United States Patent Application Publication US 2023/0075314 A1 - sequence listing, part 4

SEQ ID NO: 12327 - DNA, 2208 bp, Artificial Sequence
  source: /note="Description of Artificial Sequence: Synthetic polynucleotide"
atggctgccgatggttatcttccagattggctcgaggacactctctctgaaggaataagacagtggtggaagctcaaacctggcccaccaccaccaaggcccgcagagcggcatcaggacgacagcaggggtcttgtgcttcctgggtacaagtacctcggacccttcaacggactcgacaaaggagagccggtcaacgaggcagacgctgcggccctcgagcacgacaaggcctacgaccggcagctcgacagcggagacaacccgtacctcaagtacaaccacgccgacgcggagtttcaggagcgtcttaaagaagatacgtcttttgggggcaacctcggacgagcagtcttccaggcgaaaaagagggttcttgaacctctgggcctggttgaggaacctgttaagacggctccgggaaaaaagaggccggtagagcactctcctgcggagccagactcctcctcgggaaccggaaaagcgggccagcagcctgcaagaaagagattgaatttcggtcagactggagacgcagactccgtacctgacccccagcctctcggacagccaccagcagcccccacaagtttgggatctactacaatggctacaggcagtggcgcaccaatggcagacaataacgagggtgccgatggagtgggtaattcctcaggaaattggcattgcgattcccaatggctgggcgacagagtcatcaccaccagcacccgaacctgggccctgcccacctacaacaaccacctctacaagcaaatctccagccaatcaggagcatcgaacgacaaccactactttggctacagcaccccttgggggtattttgacttcaacagattccactgtcacttctccccacgtgactggcaaagactcatcaacaacaactggggattccgacccaagagactcaacttcaagctctttaacattcaagtcaaagaggtcacgcagaatgacggtacgacgacgattgccaataaccttaccagcacggttcaggtgtttactgactcggagtaccagctcccgtacgtcctcggctcggcgcatcaaggatgcctcccgccgtttccagcggacgtcttcatggtcccacagtatggatacctcaccctgaacaacgggagtcaggcggtaggacgctcttccttttactgcctggagtactttccttctcagatgctgcgtaccggaaacaactttaccttcagctacacctttgaggacgtgcccttccacagcagctacgctcacagccagagtttggaccggctgatgaatcctctgatcgaccagtatctgtattatctgaacaggacacaatcaaatagtggaactcttcagcagtctaggctactgtttagccaagctggacccaccagcatgtcccttcaagctaaaaactggctgcctggaccttgctacagacagcagcgtctgtcaaagcaggcaaacgacaacaacaacagcaactttccctggactgcggctacaaagtatcatctaaatggtcgggactcgttggttaatccaggaccagctatggccagccacaaagacgatgaagaaaagtttttccccatgcatggaaccctgatatttggtaaacaaggaacaaatgctaacgacgcggatttggaacatgtcatgattacagatgaagaagaaatcaggaccaccaatcccgtggctacagagcagtacggaaacgtgtcaaataatttgcaaaactcaaatactggtccaactacagaaaatgtcaatcaccagggagcgttacctggtatggtgtggcaggatcgagacgtgtacctgcagggacccatttgggccaagattcctcacaccgacggacactttcacccttctccactgatgggaggttttggactcaaacacccgcctcctcaaatcatgatcaaaaacactcctgttccagccaatcctcctacaaacttcagcgcggcaaagtttgcttccttcatcacacggtattccacgggacaggtcagcgtggagatcgagtgggagctgcagaaggagaacagcaaacgctggaaccccgagatccagtacacttccaactacaacaaatctgttaatgtggactttactgtggacgctaatggtgtgtattcagagcctcgccccattggcaccagatacctgactcgtaatctgtaa

SEQ ID NO: 12328 - DNA, 2208 bp, Artificial Sequence
  source: /note="Description of Artificial Sequence: Synthetic polynucleotide"
atggctgccgatggttatcttccagattggctcgaggacactctctctgaaggaataagacagtggtggaagctcaaacctggcccaccaccaccaaggcccgcagagcggcatcaggacgacagcaggggtcttgtgcttcctgggtacaagtacctcggacccttcaacggactcgacaaaggagagccggtcaacgaggcagacgctgcggccctcgagcacgacaaggcctacgaccggcagctcgacagcggagacaacccgtacctcaagtacaaccgcgccgacgcggagtttcaggagcgtcttaaagaagatacgtcttttgggggcaacctcggacgagcagtcttccaggcgaaaaagagggttcttgaacctctgggcctggttgaggaacctgttaagacggctccgggaaaaaagaggccggtagagcactctcctgcggagccagactcctcctcgggaaccggaaaagcgggccagcagcctgcaagaaagagattgaatttcggtcagactggagacgcagactccgtacctgacccccagcctctcggacagccaccagcagcccccacaagtttgggatctactacaatggctacaggcagtggcgcaccaatggcagacaataacgagggtgccgatggagtgggtaattcctcaggaaattggcattgcgattcccaatggctgggcgacagagtcatcaccaccagcacccgaacctgggccctgcccacctacaacaaccacctctacaagcaaatctccagccaatcaggagcatcgaacgacaaccactactttggctacagcaccccttgggggtattttgacttcaacagattccactgtcacttctccccacgtgactggcaaagactcatcaacaacaactggggattccgacccaagagactcaacttcaagctctttaacattcaagtcaaagaggtcacgcagaatgacggtacgacgacgattgccaataaccttaccagcacggttcaggtgtttactgactcggagtaccagctcccgtacgtcctcggctcggcgcatcaaggatgcctcccgccgtttccagcggacgtcttcatggtcccacagtatggatacctcaccctgaacaacgggagtcaggcggtaggacgctcttccttttactgcctggagtactttccttctcagatgctgcgtaccggaaacaactttaccttcagctacacctttgaggacgtgcccttccacagcagctacgctcacagccagagtttggaccggctgatgaatcctctgatcgaccagtatctgtattatctgaacaggacacaatcaaatagtggaactcttcagcagtctaggctactgtttagccaagctggacccaccagcatgtcccttcaagctaaaaactggctgcctggaccttgctacagacagcagcgtctgtcaaagcaggcaaacgacaacaacaacagcaactttccctggactgcggctacaaagtatcatctaaatggtcgggactcgttggttaatccaggaccagctatggccagccacaaagacgatgaagaaaagtttttccccatgcatggaaccctgatatttggtaaacaaggaacaaatgctaacgacacggatttggaacatgtcatgattacagatgaagaagaaatcaggaccaccaatcccgtggctacagagcagtacggaaacgtgtcaaataatttgcaaaactcaaatactggtccaactacagaaaatgtcaatcaccagggagcgttacctggtatggtgtggcaggatcgagacgtgtacctgcagggacccatttgggccaagattcctcacaccgacggacactttcacccttctccactgatgggaggttttggactcaaacacccgcctcctcaaatcatgatcaaaaacactcctgttccagccaatcctcctacaaacttcagcgcggcaaagtttgcttccttcatcacacagtattccacgggacaggtcagcgtggagatcgagtgggagctgcagaaggagaacagcaaacgctggaaccccgagatccagtacacttccaactacaacaaatctgttaatgtggactttactgtggacgctaatggtgtgtattcagagcctcgccccattggcaccagatacctgactcgtaatctgtaa

SEQ ID NO: 12329 - DNA, 2208 bp, Artificial Sequence
  source: /note="Description of Artificial Sequence: Synthetic polynucleotide"
atggctgccgatggttatcttccagattggctcgaggacactctctctgaaggaataagacagtggtggaagctcaaacctggcccaccaccaccaaggcccgcagagcggcatcaggacgacagcaggggtcttgtgcttcctgggtacaagtacctcggacccttcaacggactcgacaaaggagagccggtcaacgaggcagacgctgcggccctcgagcacgacaaggcctacgaccggcagctcgacagcggagacaacccgtacctcaagtacaaccacgccgacgcggagtttcaggagcgtcttaaagaagatacgtcttttgggggcaacctcggacgagcagtcttccaggcgaaaaagagggttcttgaacctctgggcctggttgaggaacctgttaagacggctccgggaaaaaagaggccggtagagcactctcctgcggagccagactcctcctcgggaaccggaaaagcgggccagcagcctgcaagaaagagattgaatttcggtcagactggagacgcagactccgtacctgacccccagcctctcggacagccaccagcagcccccacaagtttgggatctactacaatggctacaggcagtggcgcaccaatggcagacaataacgagggtgccgatggagtgggtaattcctcaggaaattggcattgcgattcccaatggctgggcgacagagtcatcaccaccagcacccgaacctgggccctgcccacctacaacaaccacctctacaagcaaatctccagccaatcaggagcatcgaacgacaaccactactttggctacagcaccccttgggggtattttgacttcaacagattccactgtcacttctccccacgtgactggcaaagactcatcaacaacaactggggattccgacccaagagactcaacttcaagctctttaacattcaagtcaaagaggtcacgcagaatgacggtacgacgacgattgccaataaccttaccagcacggttcaggtgtttactgactcggagtaccagctcccgtacgtcctcggctcggcgcatcaaggatgcctcccgccgtttccagcggacgtcttcatggtcccacagtatggatacctcaccctgaacaacgggagtcaggcggtaggacgctcttccttttactgcctggagtactttccttctcagatgctgcgtaccggaaacaactttaccttcagctacacctttgaggacgtgcccttccacagcagctacgctcacagccagagtttggaccggctgatgaatcctctgatcgaccagtatctgtattatctgaacaggacacaatcaaatagtggaactcttcagcagtctaggctactgtttagccaagctggacccaccagcatgtcccttcaagctaaaaactggctgcctggaccttgctacagacagcagcgtctgtcaaagcaggcaaacgacaacaacaacagcaactttccctggactgcggctacaaagtatcatctaaatggtcgggactcgttggttaatccaggaccagctatggccagccacaaagacgatgaagaaaagtttttccccatgcatggaaccctgatatttggtaaacaaggaacaaatgctaacgacgcggatttggaacatgtcatgattacagatgaagaagaaatcaggaccaccaatcccgtggctacagagcagtacggaaacgtgtcaaataatttgcaaaactcaaatactggtccaactacagaaaatgtcaatcaccagggagcgttacctggtatggtgtggcaggatcgagacgtgtacctgcagggacccatttgggccaagattcctcacaccgacggacacyttcacccttctccactgatgggaggttttggactcaaacacccgcctcctcaaatcatgatcaaaaacactcctgttccagccaatcctcctacaaacttcagcgcggcaaagtttgcttccttcatcacacagtattccacgggacaggtcagcgtggagatcgagtgggagctgcagaaggagaacagcaaacgctggaaccccgagatccagtacacttccaactacaacaaatctgttaatgtggactttactgtggacgctaatggtgtgtattcagagcctcgccccattggcaccagatacctgactcgtaatctgtaa

SEQ ID NO: 12330 - DNA, 2208 bp, Artificial Sequence
  source: /note="Description of Artificial Sequence: Synthetic polynucleotide"
atggctgccgatggttatcttccagattggctcgaggacactctctctgaaggaataagacagtggtggaagctcaaacctggcccaccaccaccaaggcccgcagagcggcatcaggacgacagcaggggtcttgtgcttcctgggtacaagtacctcggacccttcaacggactcgacaaaggagagccggtcaacgaggcagacgctgcggccctcgagcacgacaaggcctacgaccggcagctcgacagcggagacaacccgtacctcaagtacaaccacgccgacgcggagtttcaggagcgtcttaaagaagatacgtcttttgggggcaacctcggacgagcagtcttccaggcgaaaaagagggttcttgaacctctgggcctggttgaggaacctgttaagacggctccgggaaaaaagaggccggcagagcactctcctgcggagccagactcctcctcgggaaccggaaaagcgggccagcagcctgcaagaaagagattgaatttcggtcagactggagacgcagactccgtacctgacccccagcctctcggacagccaccagcagcccccacaagtttgggatctactacaatggctacaggcagtggcgcaccaatggcagacaataacgagggtgccgatggagtgggtaattcctcaggaaattggcattgcgattcccaatggctgggcgacagagtcatcaccaccagcacccgaacctgggccctgcccacctacaacaaccacctctacaagcaaatctccagccaatcaggagcatcgaacgacaaccactactttggctacagcaccccttgggggtattttgacttcaacagattccactgtcacttctccccacgtgactggcaaagactcatcaacaacaactggggattccgacccaagagactcaacttcaagctctttaacattcaagtcaaagaggtcacgcagaatgacggtacgacgacgattgccaataaccttaccagcacggttcaggtgtttactgactcggagtaccagctcccgtacgtcctcggctcggcgcatcaaggatgcctcccgccgtttccagcggacgtcttcatggtcccacagtatggatacctcaccctgaacaacgggagtcaggcggtaggacgctcttccttttactgcctggagtactttccttctcagatgctgcgtaccggaaacaactttaccttcagctacacctttgaggacgtgcccttccacagcagctacgctcacagccagagtttggaccggctgatgaatcctctgatcgaccagtatctgtattatctgaacaggacacaatcaaatagtggaactcttcagcagtctaggctactgtttagccaagctggacccaccagcatgtcccttcaagctaaaaactggctgcctggaccttgctacagacagcagcgtctgtcaaagcaggcaaacgacaacaacaacagcaactttccctggactgcggctacaaagtatcatctaaatggtcgggactcgttggttaatccaggaccagctatggccagccacaaagacgatgaagaaaagtttttccccatgcatggaaccctgatatttggtaaacaaggaacaaatgctaacgacgcggatttggaacatgtcatgattacagatgaagaagaaatcaggaccaccaatcccgtggctacagagcagtacggaaacgtgtcaaataatttgcaaaactcaaatactggtccaactacagaaaatgtcaatcaccagggagcgttacctggtatggtgtggcaggatcgagacgtgtacctgcagggacccatttgggccaagattcctcacaccgacggacactttcacccttctccactgatgggaggttttggactcaaacacccgcctcctcaaatcatgatcaaaaacactcctgttccagccaatcctcctacaaacttcagcgcggcaaagtttgcttccttcatcacacagtattccacgggacaggtcagcgtggagatcgagtgggagctgcagaaggagaacagcaaacgctggaaccccgagatccagtacacttccaactacaacaaatctgttaatgtggactttactgtggacgctaatggtgtgtattcagagcctcgccccattggcaccagatacctgactcgtaatctgtaa

SEQ ID NO: 12331 - DNA, 2208 bp, Artificial Sequence
  source: /note="Description of Artificial Sequence: Synthetic polynucleotide"
atggctgccgatggttatcttccagattggctcgaggacactctctctgaaggaataagacagtggtggaagctcaaacctggcccaccaccaccaaggcccgcagagcggcatcaggacgacagcaggggtcttgtgcttcctgggtacaagtacctcggacccttcaacggactcgacaaaggagagccggtcaacgaggcagacgctgcggccctcgagcacgacaaggcctacgaccggcagctcgacagcggagacaacccgtacctcaagtacaaccacgccgacgcggagtttcaggagcgtcttaaagaagatacgtcttttgggggcaacctcggacgagcagtcttccaggcgaaaaagagggttcttgaacctctgggcctggttgaggaacctgttaagacggctccgggaaaaaagaggccggtagagcactctcctgcggagccagactcctcctcgggaaccggaaaagcgggccagcagcctgcaagaaagagattgaatttcggtcagactggagacgcagactccgtacctgacccccagcctctcggacagccaccagcagcccccacaagtttgggatctactacaatggctacaggcagtggcgcaccaatggcagacaataacgagggtgccgatggagtgggtaattcctcaggaaattggcattgcgattcccaatggctgggcgacagagtcatcaccaccagcacccgaacctgggccctgcccacctacaacaaccacctctacaagcaaatctccagccaatcaggagcatcgaacgacaaccactactttggctacagcaccccttgggggtattttgacttcaacagattccactgtcacttctccccacgtgactggcaaagactcatcaacaacaactggggattccgacccaagagactcaacttcaagctctttaacattcaagtcaaagaggtcacgcagaatgacggtacgacgacgattgccaataaccttaccagcacggttcaggtgtttactgactcggagtaccagctcccgtacgtcctcggctcggcgcatcaaggatgcctcccgccgtttccagcggacgtcttcatggtcccacagtatggatacctcaccctgaacaacgggagtcaggcggtaggacgctcttccttttactgcctggagtactttccttctcagatgctgcgtaccggaaacaactttaccttcagctacacctttgaggacgtgcccttccacagcagctacgctcacagccagagtttggaccggctgatgaatcctctgatcgaccagtatctgtattatctgaacaggacacaatcaaatagtggaactcttcagcagcctaggctactgtttagccaagctggacccaccagcatgtcccttcaagctaaaaactggctgcctggaccttgctacagacagcagcgtctgtcaaagcaggcaaacgacaacaacaacagcaactttccctggactgcggctacaaagtatcatctaaatggtcgggactcgttggttaatccaggaccagctatggccagccacaaagacgatgaagaaaagtttttccccatgcatggaaccctgatatttggtaaacaaggaacaaatgctaacgacgcggatttggaacatgtcatgattacagatgaagaagaaatcaggaccaccaatcccgtggctacagagcagtacggaaacgtgtcaaataatttgcaaaactcaaatactggtccgactacagaaaatgtcaatcaccagggagcgttacctggtatggtgtggcaggatcgagacgtgtacctgcagggacccatttgggccaagattcctcacaccgacggacactttcacccttctccactgatgggaggttttggactcaaacacccgcctcctcaaatcatgatcaaaaacactcctgttccagccaatcctcctacaaacttcagcgcggcaaagtttgcttccttcatcacacagtattccacgggacaggtcagcgtggagatcgagtgggagctgcagaaggagaacagcaaacgctggaaccccgagatccagtacacttccaactacaacaaatctgttaatgtggactttactgtggacgctaatggtgtgtattcagagcctcgccccattggcaccagatacctgactcgtaatctgtaa

SEQ ID NO: 12332 - DNA, 2208 bp, Artificial Sequence
  source: /note="Description of Artificial Sequence: Synthetic polynucleotide"
atggctgccgatggttatcttccagattggctcgaggacactctctctgaaggaataagacagtggtggaagctcaaacctggcccaccaccaccaaggcccgcagagcggcatcaggacgacagcaggggtcttgtgcttcctgggtacaagtacctcggacccttcaacggactcgacaaaggagagccggtcaacgaggcagacgctgcggccctcgagcacgacaaggcctacgaccggcagctcgacagcggagacaacccgtacctcaagtacaaccacgccgacgcggagtttcaggagcgtcttaaagaagatacgtcttttgggggcaacctcggacgagcagtcttccaggcgaaaaagagggttcttgaacctctgggcctggttgaggaacctgttaagacggctccgggaaaaaagaggccggtagagcactctcctgcggagccagactcctcctcgggaaccggaaaagcgggccagcagcctgcaagaaagagattgaatttcggtcagactggagacgcagactccgtacctgacccccagcctctcggacagccaccagcagcccccacaagtttgggatctactacaatggctacaggcagtggcgcaccaatggcagacaataacgagggtgccgatggagtgggtaattcctcaggaaattggcattgcgattcccaatggctgggcgacagagtcatcaccaccagcacccgaacctgggccctgcccacctacaacaaccacctctacaagcaaatctccagccaatcaggagcatcgaacgacaaccactactttggctacagcaccccttgggggtattttgacttcaacagattccactgtcacttctccccacgtgactggcaaagactcatcaacaacaactggggattccgacccaagagactcaacttcaagctctttaacattcaagtcaaagaggtcacgcagaatgacggtacgacgacgattgccaataaccttaccagcacggttcaggtgtttactgactcggagtaccagctcccgtacgtcctcggctcggcgcatcaaggatgcctcccgccgtttccagcggacgtcttcatggtcccacagtatggatacctcaccctgaacaacgggagtcaggcggtaggacgctcttccttttactgcctggagtactttccttctcagatgctgcgtaccggaaacaactttaccttcagctacacctttgaggacgtgcccttccacagcagctacgctcacagccagagtttggaccggctgatgaatcctctgatcgaccagtatctgtattatctgaacaggacacaatcaaatagtggaactcttcagcagtctaggctactgtttagccaagctggacccaccagcatgtcccttcaagctaaaaactggctgcctggaccttgctacagacagcagcgtctgtcaaagcaggcaaacgacaacaacaacagcaactttccctggactgcggctacaaagtatcatctaaatggtcgggactcgttggttaatccaggaccagctatggccagccacaaagacgatgaagaaaagtttttccccatgcatggaaccctgatatttggtaaacaaggaacaaatgctaacgacrcggatttggaacatgtcatgattacagatgaagaagaaatcaggaccaccaatcccgtggctacagagcagtacggaaacgtgtcaaataatttgcaaaactcaaatactggtccaactacagaaaatgtcaatcaccagggagcgttacctggtatggtgtggcaggatcgagacgtgtacctgcagggacccatttgggccaagattcctcacaccgacggacactttcacccttctccactgatgggaggttttggactcaaacacccgcctcctcaaatcatgatcaaaaacactcctgttccagccaatcctcctacaaacttcagcgcggcaaagtttgcttccttcatcacacagtattccacgggacaggtcagcgtggagatcgagtgggagctgcagaaggagaacagcaaacgctggaaccccgagacccagtacacttccaactacaacaaatctgttaatgtggactttactgtggacgctaatggtgtgtattcagagcctcgccccattggcaccagatacctgactcgtaatctgtaa

SEQ ID NO: 12333 - DNA, 2208 bp, Artificial Sequence
  source: /note="Description of Artificial Sequence: Synthetic polynucleotide"
atggctgccgatggttatcttccagattggctcgaggacactctctctgaaggaataagacagtggtggaagctcaaacctggcccaccactaccaaggcccgcagagcggcatcaggacgacagcaggggtcttgtgcttcctgggtacaagtacctcggacccttcaacggactcgacaaaggagagccggtcaacgaggcagacgctgcggccctcgagcacgacaaggcctacgaccggcagctcgacagcggagacaacccgtacctcaagtacaaccacgccgacgcggagtttcaggagcgtcttaaagaagatacgtcttttgggggcaacctcggacgagcagtcttccaggcgaaaaagagggttcttgaacctctgggcctggttgaggaacctgttaagacggctccgggaaaaaagaggccggtagagcactctcctgcggagccagactcctcctcgggaaccggaaaagcgggccagcagcctgcaagaaagagattgaatttcggtcagactggagacgcagactccgtacctgacccccagcctctcggacagccaccagcagcccccacaagtttgggatctactacaatggctacaggcagtggcgcaccaatggcagacaataacgagggtgccgatggagtgggtaattcctcaggaaattggcattgcgattcccaatggctgggcgacagagtcatcaccaccagcacccgaacctgggccctgcccacctacaacaaccacctctacaagcaaatctccagccaatcaggagcatcgaacgacaaccactactttggctacagcaccccttgggggtattttgacttcaacagattccactgtcacttctccccacgtgactggcaaagactcatcaacaacaactggggattccgacccaagagactcaacttcaagctctttaacattcaagtcaaagaggtcacgcagaatgacggtacgacgacgattgccaataaccttaccagcacggttcaggtgtttactgactcggagtaccggctcccgtacgtcctcggctcggcgcatcaaggatgcctcccgccgtttccagcggacgtcttcatggtcccacagtatggatacctcaccctgaacaacgggagtcaggcggtaggacgctcttccttttactgcctggagtactttccttctcagatgctgcgtaccggaaacaactttaccttcagctacacctttgaggacgtgcccttccacagcagctacgctcacagccagagtttggaccggctgatgaatcctctgatcgaccagtatctgtattatctgaacaggacacaatcaaatagtggaactcttcagcagtctaggctactgtttagccaagctggacccaccagcatgtcccttcaagctaaaaactggctgcctggaccttgctacagacagcagcgtctgtcaaagcaggcaaacgacaacaacaacagcaactttccctggactgcggctacaaagtatcatctaaatggtcgggactcgttggttaatccgggaccagctatggccagccacaaagacgatgaagaaaagtttttccccatgcatggaaccctgatatttggtaaacaaggaacaaatgctaacgacgcggatttggaacatgtcatgattacagatgaagaagaaatcaggaccaccaatcccgtggctacagagcagtacggaaacgtgtcaaataatttgcaaaactcaaatactggtccaactacagaaaatgtcaatcaccagggagcgttacctggtatggtgtggcaggatcgagacgtgtacctgcagggacccatttgggccaagattcctcacaccgacggacactttcacccttctccactgatgggaggttttggactcaaacacccgcctcctcaaatcatgatcaaaaacactcctgttccagccaatcctcctacaaacttcagcgcggcaaagtttgcttccttcatcacacagtattccacgggacaggtcagcgtggagatcgagtgggagctgcagaaggagaacagcaaacgctggaaccccgagatccagtacacttccaactacaacaaatctgttaatgtggactttactgtggacgctaatggtgtgtattcagagcctcgccccattggcaccagatacctgactcgtaatctgtaa

SEQ ID NO: 12334 - DNA, 2208 bp, Artificial Sequence
  source: /note="Description of Artificial Sequence: Synthetic polynucleotide"
atggctgccgatggttatcttccagattggctcgaggacactctctctgaaggaataagacagtggtggaagctcaaacctggcccaccaccaccaaggcccgcagagcggcatcaggacgacagcaggggtcttgtgcttcctgggtacaagtacctcggacccttcaacggactcgacaaaggagagccggtcaacgaggcagacgctgcggccctcgagcacgacaaggcctacgaccggcagctcgacagcggagacaacccgtacctcaagtacaaccacgccgacgcggagtttcaggagcgtcttaaagaagatacgtcttttgggggcaacctcggacgagcagtcttccaggcgaaaaagagggttcttgaacctctgggcctggttgaggaacctgttaagacggctccgggaaaaaagaggccggtagagcactctcctgcggagccagactcctcctcgggaaccggaaaagcgggccagcagcctgcaagaaagagattgaatttcggtcagactggagacgcagactccgtacctgacccccagcctctcggacagccaccagcagcccccacaagtttgggatctactacaatggctacaggcagtggcgcaccaatggcagacaataacgagggtgccgatggagtgggtaattcctcaggaaattggcattgcgattcccaatggctgggcgacagagtcatcaccaccagcacccgaacctgggccctgcccacctacaacaaccacctctacaagcaaatctccagccaatcaggagcatcgaacgacaaccactactttggctacagcaccccttgggggtattttgacttcaacagattccactgtcacttctccccacgtgactggcaaagactcatcaacaacaactggggattccgacccaagagactcaacttcaagctctttaacattcaagtcaaagaggtcacgcagaatgacggtacgacgacgattgccaataaccttaccagcacggttcaggtgtttactgactcggagtaccagctcccgtacgtcctcggctcggcgcatcaaggatgcctcccgccgtttccagcggacgtcttcatggtcccacagtatggatacctcaccctgaacaacgggagtcaggcggtaggacgctcttccttttactgcctggagtactttccttctcagatgctgcgtaccggaaacaactttaccttcagctacacctttgaggacgtgcccttccacagcagctacgctcacagccagagtttggaccggctgatgaatcctctgaccgaccagtatctgtattatctgaacaggacacaatcaaatagtggaactcttcagcagtctaggctactgtttagccaagctggacccaccagcatgtcccttcaagctaaaaactggctgcctggaccttgctacagacagcagcgtctgtcaaagcaggcaaacgacaacaacaacagcaactttccctggactgcggctacaaagtatcatctaaatggtcgggactcgttggttaatccaggaccagctatggccagccacaaagacgatgaagaaaagtttttccccatgcatggaaccctgatatttggtaaacaaggaacaaatgctaacgacacggatttggaacatgtcatgattacagatgaagaagaaatcaggaccaccaatcccgtggctacagagcagtacggaaacgtgtcaaataatttgcaaaactcaaatactggtccaactacagaaaatgtcaatcaccagggagcgttacctggtatggtgtggcaggatcgagacgtgtacctgcagggacccatttgggccaagattcctcacaccgacggacactttcacccttctccactgatgggaggttttggactcaaacacccgcctcctcaaatcatgatcaaaaacactcctgttccagccaatcctcctacaaacttcagcgcggcaaagtttgcttccttcatcacacagtattccacgggacaggtcagcgtggagatcgagtgggagctgcagaaggagaacagcaaacgctggaaccccgagatccagtacacttccaactacaacaaatctgttaatgtggactttactgtggacgctaatggtgtgtattcagagcctcgccccattggcaccagatacctgactcgtaatctgtaa

SEQ ID NO: 12335 - DNA, 2208 bp, Artificial Sequence
  source: /note="Description of Artificial Sequence: Synthetic polynucleotide"
atggctgccgatggttatcttccagattggctcgaggacactctctctgaaggaataagacagtggtggaagctcaaacctggcccaccaccaccaaggcccgcagagcggcatcaggacgacagcaggggtcttgtgcttcctgggtacaagtacctcggacccttcaacggactcgacaaaggagagccggtcaacgaggcagacgctgcggccctcgagcacgacaaggcctacgaccggcagctcgacagcggagacaacccgtacctcaagtacaaccacgccgacgcggagtttcaggagcgtcttaaagaagatacgtcttttgggggcaacctcggacgagcagtcttccaggcgaaaaagagggttcttgaacctctgggcctggttgaggaacctgttaagacggctccgggaaaaaagaggccggtagagcactctcctgcggagccagactcctcctcgggaaccggaaaagcgggccagcagcctgcaagaaagagattgaatttcggtcagactggagacgcagactccgtacctgacccccagcctctcggacagccaccagcagcccccacaagtttgggatctactacaatggctacaggcagtggcgcaccaatggcagacaataacgagggtgccgatggagtgggtaattcctcaggaaattggcattgcgattcccaatggctgggcgacagagtcatcaccaccagcacccgaacctgggccctgcccacctacaacaaccacctctacaggcaaatctccagccaatcaggagcatcgaacgacaaccactactttggctacagcaccccttgggggtattttgacttcaacagattccactgtcacttctccccacgtgactggcaaagactcatcaacaacaactggggattccgacccaagagactcaacttcaagctctttaacattcaagtcaaagaggtcacgcagaatgacggtacgacgacgattgccaataaccttaccagcacggttcaggtgtttactgactcggagtaccagctcccgtacgtcctcggctcggcgcatcaaggatgcctcccgccgtttccagcggacgtcttcatggtcccacagtatggatacctcaccctgaacaacgggagtcaggcggtaggacgctcttccttttactgcctgaagtactttccttctcagatgctgcgtaccggaaacaactttaccttcagctacacctttgaggacgtgcccttccacagcagctacgctcacagccagagtttggaccggctgatgaatcctctgatcgaccagtatctgtattatctgaacaggacacaatcaaatagtggaactcttcagcagtctaggctactgtttagccaagctggacccaccagcatgtcccttcaagctaaaaactggctgcctggaccttgctacagacagcagcgtctgtcaaagcaggcaaacgacaacaacaacagcaactttccctggactgcggctacaaagtatcatctaaatggtcgggactcgttggttaatccaggaccagctatggccagccacaaagacgatgaagaaaagtttttccccctgcatggaaccctgatatttggtaaacaaggaacaaatgctaacgacacggatttggaacatgtcatgattacagatgaagaagaaatcaggaccaccaatcccgtggctacagagcagtacggaaacgtgtcaaataatttgcaaaactcaaatactggtccaactacagaaaatgtcaatcaccagggagcgttacctggtatggtgtggcaggatcgagacgtgtacctgcagggacccatttgggccaagattcctcacaccgacggacactttcacccttctccactgatgggaggttttggactcaaacacccgcctcctcaaatcatgatcaaaaacactcctgttccagccaatcctcctacaaacttcagcgcggcaaagtttgcttccttcatcacacagtattccacgggacaggtcagcgtggagatcgagtgggagctgcagaaggagaacagcaaacgctggaaccccgagatccagtacacttccaactacaacaaatctgttaatgtggactttactgtggacgctaatggtgtgtattcagagcctcgccccattggcaccagatacctgactcgtaatctgtaa

SEQ ID NO: 12336 - DNA, 2208 bp, Artificial Sequence
  source: /note="Description of Artificial Sequence: Synthetic polynucleotide"
atggctgccgatggttatcttccagattggctcgaggacactctctctgaaggaataagacagtggtggaagctcaaacctggcccaccaccaccaaggcccgcagagcggcatcaggacgacagcaggggtcttgtgcttcctgggtacaagtacctcggacccttcaacggactcgacaaaggagagccggtcaacgaggcagacgctgcggccctcgagcacgacaaggcctacgaccggcagctcgacagcggagacaacccgtacctcaagtacaaccacgccgacgcggagtttcaggagcgtcttaaagaagatacgtcttttgggggcaacctcggacgagcagtcttccaggcgaaaaagagggttcttgaacctctgggcctggttgaggaacctgttaagacggctccgggaaaaaagaggccggtagagcactctcctgcggagccagactcctcctcgggaaccggaaaagcgggccagcagcctgcaagaaagagattgaatttcggtcagactggagacgcagactccgtacctgacccccagcctctcggacagccaccagcagcccccacaagtttgggatctactacaatggctacaggcagtggcgcaccaatggcagacaataacgagggtgccgatggagtgggtaattcctcaggaaattggcattgcgattcccaatggctgggcgacagagtcatcaccaccagcacccgaacctgggccctgcccacctacaacaaccacctctacaggcaaatctccagccaatcaggagcatcgaacgacaaccactactttggctacagcaccccttgggggtattttgacttcaacagattccactgtcacttctccccacgtgactggcaaagactcatcaacaacaactggggattccgacccaagagactcaacttcaagctctttaacattcaagtcaaagaggtcacgcagaatgacggtacgacgacgattgccaataaccttaccagcacggttcaggtgtttactgactcggagtaccagctcccgtacgtcctcggctcggcgcatcaaggatgcctcccgccgtttccagcggacgtcttcatggtcccacagtatggatacctcaccctgaacaacgggagtcaggcggtaggacgctcttccttttactgcctggagtactttccttctcagatgctgcgtaccggaaacaactttaccttcagctacacctttgaggacgtgcccttccacagcagctacgctcacagccagagtttggaccggctgatgaatcctctgatcgaccagtatctgtattatctgaacaggacacaatcaaatagtggaactcttcagcagtctaggctactgtttagccaagctggacccaccagcatgtcccttcaagctaaaaactggctgcctggaccttgctacagacagcagcgtctgtcaaagcaggcaaacgacaacaacaacagcaactttccctggactgcggctacaaagtatcatctaaatggtcgggactcgttggttaatccaggaccagctatggccagccacaaagacgatgaagaaaagtttttccccatgcatggaaccctgatatttggtaaacaaggaacaaatgctaacgacacggatttggaacatgtcatgattacagatgaagaagaaatcaggaccaccaatcccgtggctacagagcagtacggaaacgtgtcaaataatttgcaaaactcaaatactggtccaactacagaaaatgtcaatcaccagggagcgttacctggtatggtgtggcaggatcgagacgtgtacctgcagggacccatttgggccaagattcctcacaccgacggacactttcacccttctccactgatgggaggttttggactcaaacacccgcctcctcaaatcatgatcaaaaacactcctgttccagccaatcctcctacaaacttcagcgcggcaaagtttgcttccttcatcacacagtattccacgggacaggtcagcgtggagatcgagtgggtgctgcagaaggagaacagcaaacgctggaaccccgagatccagtacacttccaactacaacaaatctgttaatgtggactttactgtggacgctaatggtgtgtattcagagcctcgccccattggcaccagatacctgactcgtaatctgtaa

SEQ ID NO: 12337 - DNA, 2208 bp, Artificial Sequence
  source: /note="Description of Artificial Sequence: Synthetic polynucleotide"
atggctgccgatggttatcttccagattggctcgaggacactctctctgaaggaataagacagtggtggaagctcaaacctggcccaccaccaccaaggcccgcagagcggcatcaggacgacagcaggggtcttgtgcttcctgggtacaagtacctcggacccttcaacggactcgacaaaggagagccggtcaacgaggcagacgctgcggccctcgagcacgacaaggcctacgaccggcagctcgacagcggagacaacccgtacctcaagtacaaccacgccgacgcggagtttcaggagcgtcttaaagaagatacgtcttttgggggcaacctcggacgagcagtcttccaggcgaaaaagagggttcttgaacctctgggcctggttgaggaacctgttaagacggctccgggaaaaaagaggccggtagagcactctcctgcggagccagactcctcctcgggaaccggaaaagcgggccagcagcctgcaagaaagagattgaatttcggtcagactggagacgcagactccgtacctgacccccagcctctcggacagccaccagcagcccccacaagtttgggatctactacaatggctacaggcagtggcgcaccaatggcagacaataacgagggtgccgatggagtgggtaattcctcaggaaattggcattgcgattcccaatggctgggcgacagagtcatcaccaccagcacccgaacctgggccctgcccacctacaacaaccacctctacaagcaaatctccagccaatcaggagcatcgaacgacaaccactactttggctacagcaccccttgggggtattttgacttcaacagattccactgtcacttctccccacgtgactggcaaagactcatcaacaacaactggggattccgacccaagagactcaacttcaagctctttaacattcaagtcaaagaggtcacgcagaatgacggtacgacgacgattgccaataaccttatcagcacggttcaggtgtttactgactcggagtaccagctcccgtacgtcctcggctcggcgcatcaaggatgcctcccgccgtttccagcggacgtcttcatggtcccacagtatggatacctcaccctgaacaacgggagtcaggcggtaggacgctcttccttttactgcctggagtactttccttctcagatgctgcgtaccggaaacaactttaccttcagctacacctttgaggacgtgcccttccacagcagctacgctcacagccagagtttggaccggctgatgaatcctctgatcgaccagtatctgtattatctgaacaggacacaatcaaatagtggaactcttcagcagtctaggctactgtttagccaagctggacccaccagcatgtcccttcaagctaaaaactggctgcctggaccttgctacagacagcagcgtctgtcaaagcaggcaaacgacaacaacaacagcaactttccctggactgcggctacaaagtatcatctaaatggtcgggactcgttggttaatccaggaccagctatggccagccacaaagacgatgaagaaaagtttttccccatgcatggaaccctgatatttggtaaacaaggaacaaatgctaacgacgcggatttggaacatgtcatgattacagatgaagaagaaatcaggaccaccaatcccgtggctacagagcagtacggaaacgtgtcaaataatttgcaaaactcaaatactggtccaactacagaaaatgtcaatcaccagggagcgttacctggtatggtgtggcaggatcgagacgtgtacctgcagggacccatttgggccaagattcctcacaccgacggacactttcacccttctccactgatgggaggttttggactcaaacacccgcctcctcaaatcatgatcaaaaacactcctgttccagccaatcctcctacaaacttcagcgcggcaaagtttgcttccttcatcacacagtattccacgggacaggtcagcgtggagatcgagtgggagctgcagaaggagaacagcaaacgctggaaccccgagatccagtacacttccaactacaacaaatctgttaatgtggactttactgtggacgctaatggtgtgtattcagagcctcgccccattggcaccagatacctgactcgtaatctgtaa

SEQ ID NO: 12338 - DNA, 2205 bp, Artificial Sequence
  source: /note="Description of Artificial Sequence: Synthetic polynucleotide"
atggctgccgatggttatcttccagattggctcgaggacattctctctgaaggaataagacagtggtggaagctcaaacctggcccaccaccaccaaagcccgcagagcggcataaggacgacagcaggggtcttgtgcttcctgggtacaagtacctcggacccttcaacggactcgacaaaggagagccggtcaacgaggcagacgccgcggccctcgagcacgacaaggcctacgaccggcagctcgacagcggagacaacccgtacctcaagtacaaccacgccgacgcggagtttcaggagcgtcttaaagaagatacgtcttttgggggcaacctcggacgagcagtcttccaggcaaaaaagagggttcttgaacctctgggcctggttgaggaacctgttaagacggctccgggaaaaaagaggccggtagagcaatctcctgcggagccagactcctcctcgggaaccggaaaggcgggcaaccagcctgcaagaaagagattgaattttggtcagactggagacgcagactccgtacctgacccccagcctctcggacagccaccagcagccccctctggtctgggatctactacaatggctacaggcagtggcgcaccaatggcagacaataacgagggtgccgatggagtgggtaattcctcaggaaattggcattgcgattcccaatggttgggcgacagagtcatcaccaccagcacccgaacctgggccctgcccacctacaacaatcacctctacaagcaaatctccagccaatcaggagcagcgaacgacaaccactactttggctacagcaccccctgggggtattttgacttcaacagattccactgccacttttcaccacgtgactggcaaagactcatcaacaacaactggggattccgacccaaaagactcaacttcaagctctttaacattcaagtcaaagaggtcacgcagaatgacggtacgacgacgattgccaataaccttaccagcacggttcaggtgtttactgactcggagtaccagctcccgtacgtcctcggctcggcgcatcaaggatgcctcccgccgtttccagcggacgtcttcatggtcccacagtatggatacctcaccctgaacaacgggagtcaggcggtaggacgctcttccttttactgcctggagtactttccttctcagatgcttcgtaccggaaacaactttaccttcagttacacctttgaagacgttcctttccacagcagctacgctcacagtcaaagtctggaccggctgatgaatcctctgatagaccagtacctgtattatctaaacaaaacacaatcaaatagtggaactcttcagcagtctcggctactgtttagtcaagctggacccaccagcatgtctcttcaagctaaaaactggctgcctggaccttgctacagacaacagcgtctgtcaaagcaggcaaacgacaacaacagcaactttccctggactgcggctacaaagtatcatctaaatggccgggactcgttggttaatccaggaccagctatggccagccacaaagacgatgaagaaaagtttttccccatgcatggaaccctgatatttggtaaacaaggaacaaatgctaacgacgcggatttggacaatgtcatgattacagatgaagaagaaatccgcaccaccaatcccgtggctacggagcagtacgggactgtgtcaaataatttgcaaaactcaaatactggtccaactactggaactgtcaatcaccaaggagcgttacctggtatggtgtggcaggatcgagacgtgtaccttcagggacccatttgggccaagattcctcacaccgatggacactttcatccttctccactgatgggaggttttggactcaaacacccgcctcctcagatcatgatcaaaaacactcccgttccagccaatcctcctacaaacttcagttctgccaagtttgcttctttcatcacacagtattccacggggcaggtcagcgtggagatagagtgggagctgcagaaggagaacagcaaacgctggaaccccgagatccagtatacttccaactacaacaagtctgttaatgtggactttactgtggacactaatggtgtgtattcagagcctcgccccattggcaccagatacctgactcgtaatctgtaa

SEQ ID NO: 12339 - DNA, 2208 bp, Artificial Sequence
  source: /note="Description of Artificial Sequence: Synthetic polynucleotide"
atggctgccgatggttatcttccagattggctcgaggacattctctctgaaggaataagacagtggtggaagctcaaacctggcccaccaccaccaaagcccgcagagcggcataaggacgacagcaggggtcttgtgcttcctgggtacaagtacctcggacccttcaacggactcgacaaaggagagccggtcaacgaggcagacgccgcggccctcgagcacgacaaggcctacgaccggcagctcgacagcggagacaacccgtacctcaagtacaaccacgccgacgcggagtttcaggagcgtcttaaagaagatacgtcttttgggggcaacctcggacgagcagtcttccaggcaaaaaagagggttcttgaacctctgggcctggttgaggaacctgttaagacggctccgggaaaaaagaggccggtagagcaatctcctgcggagccagactcctcctcgggaaccggaaaggcgggcaaccagcctgcaagaaagagattgaattttggtcagactggagacgcagactccgtacctgacccccagcctctcggacagccaccagcagccccctctggtctgggatctactacaatggctacaggcagtggcgcaccaatggcagacaataacgagggtgccgatggagtgggtaattcctcaggaaattggcattgcgattcccaatggttgggcgacagagtcatcaccaccagcacccgaacctgggccctgcccacctacaacaatcacctctacaagcaaatctccagccaatcaggagcagcgaacgacagccactactttggctacagcaccccctgggggtattttgacttcaacagattccactgccacttttcaccacgtgactggcaaagactcatcaacaacaactggggattccgacccaaaagactcaacttcaagctctttaacattcaagtcaaagaggtcacgcagaatgacggtacgacgacgattgccaataaccttaccagcacggttcaggtgtttactgactcggagtaccagctcccgtacgtcctcggctcggcgcatcaaggatgcctcccgccgtttccagcggacgtcttcatggtcccacagtatggatacctcaccctgaacaacgggagtcaggcggtaggacgctcttccttttactgcctggagtactttccttctcagatgcttcgtaccggaaacaactttaccttcagttacacctttgaagacgttcctttccacagcagctacgctcacagtcaaagtctggaccggctgatgaatcctctgatagaccagtacctgtattatctaaacaaaacacaatcaaatagtggaactcttcagcagtctcggctactgtttagtcaagctggacccaccagcatgtctcttcaagctaaaaactggctgcctggaccttgctacagacaacagcgtctgtcaaagcaggcaaacgacaacaacaacagcaactttccctggactgcggctacaaagtatcatctaaatggccgggactcgttggttaatccaggaccagctatggccagccacaaagacgatgaagaaaagtttttccccatgcatggaaccctgatatttggtaaacaaggaacaaatgctaacgacgcggatttggacaatgtcatgattacagatgaagaagaaatccgcaccaccaatcccgtggctacggagcagtacgggactgtgtcaaataatttgcaaaactcaaatactggtccaactactggaactgtcaatcaccaaggagcgttacctggtatggtgtggcaggatcgagacgtgtaccttcagggacccatttgggccaagattcctcacaccgatggacactttcatccttctccactgatgggaggttttggactcaaacacccgcctcctcagatcatgatcaaaaacactcccgttccagccaatcctcctacaaacttcagttctgccaagtttgcttctttcatcacacagtattccacggggcaggtcagcgtggagatagagtgggagctgcagaaggagaacagcaaacgctggaaccccgagatccagtatacttccaactacaacaagtctgttaatgtggactttactgtggacactaatggtgtgtattcagagcctcgccccattggcaccagatacctgactcgtaatctgtaa

SEQ ID NO: 12340 - DNA, 2208 bp, Artificial Sequence
  source: /note="Description of Artificial Sequence: Synthetic polynucleotide"
atggctgccgatggttatcttccagattggctcgaggacactctctctgaaggaataagacagtggtggaagctcaaacctggcccaccaccaccaaggcccgcagagcggcatcaggacgacagcaggggtcttgtgcttcctgggtacaagtacctcggacccttcaacggactcgacaaaggagagccggtcaacgaggcagacgctgcggccctcgagcacgacaaggcctacgaccggcagctcgacagcggagacaacccgtacctcaagtacaaccacgccgacgcggagtttcaggagcgtcttaaagaagatacgtcttttgggggcaacctcggacgagcagtcttccaggcgaaaaagagggttcttgaacctctgggcctggttgaggaacctgttaagacggctccgggaaaaaagaggccggtagagcactctcctgcggagccagactcctcctcgggaaccggaaaagcgggccagcagcctgcaagaaagagattgaatttcggtcagactggagacgcagactccgtacctgacccccagcctctcggacagccaccagcagcccccacaagtttgggatctactacaatggctacaggcagtggcgcaccaatggcagacaataacgagggtgccgatggagtgggtaattcctcaggaaattggcattgcgattcccaatggctgggcgacagagtcatcaccaccagcacccgaacctgggccctgcccacctacaacaaccacctctacaagcaaatctccagccaatcaggagcatcgaacgacaaccactactttggctacagcaccccttgggggtattttgacttcaacagattccactgtcacttctccccacgtgactggcaaagactcatcaacaacaactggggattccgacccaagagactcaacttcaagctctttaacattcaagtcaaagaggtcacgcagaatgacggtacgacgacgattgccaataaccttaccagcacggttcaggtgtttactgactcggagtaccagctcccgtacgtcctcggctcggcgcatcaaggatgcctcccgccgtttccagcggacgtcttcatggtcccacagtatggatacctcaccctgaacaacgggagtcaggcggtaggacgctcttccttttactgcctggagtactttccttctcagatgctgcgtaccggaaacaactttaccttcagctacacctttgaggacgtgcccttccacagcagctacgctcacagccagagtttggaccggctgatgaatcctctgatcgaccagtatctgtattatctgaacaggacacaatcaaatagtggaactcttcagcagtctaggctactgtttagccaagctggacccaccagcatgtcccttcaagctaaaaactggctgcctggaccttgctacagacagcagcgtctgtcaaagcaggcaaacgacaacaacaacagcaactttccctggactgcggctacaaagtatcatctaaatggtcgggactcgttggttaatccaggaccagctatggccagccacaaagacgatgaagaaaagtttttccccatgcatggaaccctgatatttggtaaacaaggaacaaatgctaacgacacggatttggaacatgtcatgattacagatgaagaagaaatcaggaccaccaatcccgtggctacagagcagtacggaaacgtgtcaaataatttgcaaaactcaaatactggtccaactacagaaaatgtcaatcaccagggagcgttacctggtatggtgtggcaggatcgagacgtgtacctgcagggacccatttgggccaagattcctcacaccgacggacactttcacccttctccactgatgggaggttttgggctcaaacacccgcctcctcaaatcatgatcaaaaacactcctgttccagccaatcctcctacaaacttcagcgcggcaaagtttgcttccttcatcacacagtattccacgggacaggtcagcgtggagatcgagtgggagctgcagaaggagaacagcaaacgctggaaccccgagatccagtacacttccaactacaacaaatctgttaatgtggactttactgtggacgctaatggtgtgtattcagagcctcgccccattggcaccagatacctgactcgtaatctgtaa

SEQ ID NO: 12341 - DNA, 2205 bp, Artificial Sequence
  source: /note="Description of Artificial Sequence: Synthetic polynucleotide"
atggctgccgatggttatcttccagattggctcgaggacattctctctgaaggaataagacagtggtggaagctcaaacctggcccaccaccaaagcccgcagagcggcataaggacgacagcaggggtcttgtgcttcctgggtacaagtacctcggacccttcaacggactcgacaaaggagagccggtcaacgaggcagacgccgcggccctcgagcacgacaaggcctacgaccggcagctcgacagcggagacaacccgtacctcaagtacaaccacgccgacgcggagtttcaggagcgtcttaaagaagatacgtcttttgggggcaacctcggacgagcagtcttccaggcaaaaaagagggttcttgaacctctgggcctggttgaggaacctgttaagacggctccgggaaaaaagaggccggtagagcaatctcctgcggagccagactcctcctcgggaaccggaaaggcgggcaaccagcctgcaagaaagagattgaattttggtcagactggagacgcagactccgtacctgacccccagcctctcggacagccaccagcagccccctctggtctgggatctactacaatggctacaggcagtggcgcaccaatggcagacaataacgagggtgccgatggagtgggtaattcctcaggaaattggcattgcgattcccaatggttgggcgacagagtcatcaccaccagcacccgaacctgggccctgcccacctacaacaatcacctctacaagcaaatctccagccaatcaggagcagcgaacgacaaccactactttggctacagcaccccctgggggtattttgacttcaacagattccactgccacttttcaccacgtgactggcaaagactcatcaacaacaactggggattccgacccaaaagactcaacttcaagctctttaacattcaagtcaaagaggtcacgcagaatgacggtacgacgacgattgccaataaccttaccagcacggttcaggtgtttactgactcggagtaccagctcccgtacgtcctcggctcggcgcatcaaggatgcctcccgccgtttccagcggacgtcttcatggtcccacagtatggatacctcaccctgaacaacgggagtcaggcggtaggacgctcttccttttactgcctggagtactttccttctcagatgcttcgtaccggaaacaactttaccttcagttacacctttgaagacgttcctttccacagcagctacgctcacagtcaaagtctggaccggctgatgaatcctctgatagaccagtacctgtattatctaaacaaaacacaatcaaatagtggaactcttcagcagtctcggctactgtttagtcaagctggacccaccagcatgtctcttcaagctaaaaactggctgcctggaccttgctacagacaacagcgtctgtcaaagcaggcaaacgacaacaacaacagcaactttccctggactgcggctacaaagtatcatctaaatggccgggactcgttggttaatccaggaccagctatggccagccacaaagacgatgaagaaaagtttttccccatgcatggaaccctgatatttggtaaacaaggaacaaatgctaacgacgcggatttggacaatgtcatgattacagatgaagaagaaatccgcaccaccaatcccgtggctacggagcagtacgggactgtgtcaaataatttgcaaaactcaaatactggtccaactactggaactgtcaatcaccaaggagcgttacctggtatggtgtggcaggatcgagacgtgtaccttcagggacccatttgggccaagattcctcacaccgatggacactttcatccttctccactgatgggaggttttggactcaaacacccgcctcctcagatcatgatcaaaaacactcccgttccagccaatcctcctacaaacttcagttctgccaagtttgcttctttcatcacacagtattccacggggcaggtcagcgtggagatagagtgggagctgcagaaggagaacagcaaacgctggaaccccgagatccagtatacttccaactacaacaagtctgttaatgtggactttactgtggacactaatggtgtgtattcagagcctcgccccattggcaccagatacctgactcgtaatctgtaa

SEQ ID NO: 12342 - DNA, 2208 bp, Artificial Sequence
  source: /note="Description of Artificial Sequence: Synthetic polynucleotide"
atggctgccgatggttatcttccagattggctcgaggacactctctctgaaggaataagacagtggtggaagctcaaacctggcccaccaccaccaaggcccgcagagcggcatcaggacgacagcaggggtcttgtgcttcctgggtacaagtacctcggacccttcaacggactcgacaaaggagagccggtcaacgaggcagacgctgcggccctcgagcacgacaaggcctacgaccggcagctcgacagcggagacaacccgtacctcaagtacaaccacgccgacgcggagtttcaggagcgtcttaaagaagatacgtcttttgggggcaacctcggacgagcagtcttccaggcgaaaaagagggttcttgaacctctgggcctggttgaggaacctgttaagacggctccgggaaaaaagaggccggtagagcactctcctgcggagccagactcctcctcgggaaccggaaaagcgggccagcagcctgcaagaaagagattgaatttcggtcagactggagacgcagactccgtacctgacccccagcctctcggacagccaccagcagcccccacaagtttgggatctactacaatggctacaggcagtggcgcaccaatggcagacaataacgagggtgccgatggagtgggtaattcctcaggaaattggcattgcgattcccaatggctgggcgacagagtcatcaccaccagcacccgaacctgggccctgcccacctacaacaaccacctctacaagcaaatctccagccaatcaggagcatcgaacgacaaccactactttggctacagcaccccttgggggtattttgacttcaacagattccactgtcacttctccccacgtgactggcaaagactcatcaacaacaactggggattccgacccaagagactcaacttcaagctctttaacattcaagtcaaagaggtcacgcagaatgacggtacgacgacgattgccaataaccttaccagcacggttcaggtgtttactgactcggagtaccagctcccgtacgtcctcggctcggcgcatcaaggatgcctcccgccgtttccagcggacgtcttcatggtcccacagtatggatacctcaccctgaacaacgggagtcaggcggtaggacgctcttccttttactgcctggagtactttccttctcagatgctgcgtaccggaaacaactttaccttcagctacacctttggggacgtgcccttccacagcagctacgctcacagccagagtttggaccggctgatgaatcctctgatcgaccagtatctgtattatctgaacaggacacaatcaaatagtggaactcttcagcagtctaggctactgtttagccaagctggacccaccagcatgtcccttcaagctaaaaactggctgcctggaccttgctacagacagcagcgtctgtcaaagcaggcaaacgacaacaacaacagcaactttccctggactgcggctacaaagtatcatctaaatggtcgggactcgttggttaatccaggaccagctatggccagccacaaagacgatgaagaaaagtttttccccatgcatggaaccctgatatttggtaaacaaggaacaaatgctaacgacgcggatttggaacatgtcatgattacagatgaagaagaaatcaggaccaccaatcccgtggctacagagcagtacggaaacgtgtcaaataatttgcaaaactcaaatactggtccaactacagaaaatgtcaatcaccagggagcgttacctggtatggtgtggcaggatcgagacgtgtacctgcagggacccatttgggccaagattcctcacaccgacggacactttcacccttctccactgatgggaggttttggactcaaacacccgcctcctcaaatcatgatcaaaaacactcctgttccagccaatcctcctacaaacttcagcgcggcaaagtttgcttccttcatcacacagtattccacgggacaggtcagcgtggagatcgagtgggagctgcagaaggagaacagcaaacgctggaaccccgagatccagtacacttccaactacaacaaatctgttaatgtggactttactgtggacgctaatggtgtgtattcagagcctcgccccattggcaccagatacctgactcgtaatctgtaa

SEQ ID NO: 12343 - DNA, 2208 bp, Artificial Sequence
  source: /note="Description of Artificial Sequence: Synthetic polynucleotide"
atggctgccgatggttatcttccagattggctcgaggacactctctctgaaggaataagacagtggtggaagctcaaacctggcccaccaccaccaaggcccgcagagcggcatcaggacgacagcaggggtcttgtgcttcctgggtacaagtacctcggacccttcaacggactcgacaaaggagagccggtcaacgaggcagacgctgcggccctcgagcacgacaaggcctacgaccggcagctcgacagcggagacaacccgtacctcaagtacaaccacgccgacgcggagtttcaggagcgtcttaaagaagatacgtcttttgggggcaacctcggacgagcagtcttccaggcgaaaaagagggttcttgaacctctgggcctggttgaggaacctgttaagacggctccgggaaaaaagaggccggtagagcactctcctgcggagccagactcctcctcgggaaccggaaaagcgggccagcagcctgcaagaaagagattgaatttcggtcagactggagacgcagactccgtacctgacccccagcctctcggacagccaccagcagcccccacaagtttgggatctactacaatggctacaggcagtggcgcaccaatggcagacaataacgagggtgccgatggagtgggtaattcctcaggaaattggcattgcgattcccaatggctgggcgacagagtcatcaccaccagcacccgaacctgggccctgcccacctacaacaaccacctctacaagcaaatctccagccaatcaggagcatcgaacgacagccactactttggctacagcaccccttgggggtattttgacttcaacagattccactgtcacttctccccacgtgactggcaaagactcatcaacaacaactggggattccgacccaagagactcaacttcaagctctttaacattcaagtcaaagaggtcacgcagaatgacggtacgacgacgattgccaataaccttaccagcacggttcaggtgtttactgactcggagtaccagctcccgtacgtcctcggctcggcgcatcaaggatgcctcccgccgtttccagcggacgtcttcatggtcccacagtatggatacctcaccctgaacaacgggagtcaggcggtaggacgctcttccttttactgcctggagtactttccttctcagatgctgcgtaccggaaacaactttaccttcagctacacctttgaggacgtgcccttccacagcagctacgctcacagccagagtttggaccggctgatgaatcctctgatcgaccagtatctgtattatctgaacaggacacaatcaaatagtggaactcttcagcagtctaggctactgtttagccaagctggacccaccagcatgtcccttcaagctaaaaactggctgcctggaccttgctacagacagcagcgtctgtcaaagcaggcaaacgacaacaacaacagcaactttccctggactgcggctacaaagtatcatctaaatggtcgggactcgttggttaatccaggaccagctatggccagccacaaagacgatgaagaaaagtttttccccatgcatggaaccctgatatttggtaaacaaggaacaaatgctaacgacgcggatttggaacatgtcatgattacagatgaagaagaaatcaggaccaccaatcccgtggctacagagcagtacggaaacgtgtcaaataatttgcaaaactcaaatactggtccaactacagaaaatgtcaatcaccagggagcgttacctggtatggtgtggcaggatcgagacgtgtacctgcagggacccatttgggccaagattcctcacaccgacggacactttcacccttctccactgatgggaggttttggactcaaacacccgcctcctcaaatcatgatcaaaaacactcctgttccagccaatcctcctacaaacttcagcgcggcaaagtttgcttccttcatcacacagtattccacgggacaggtcagcgtggagatcgagtgggagctgcagaaggagaacagcaaacgctggaaccccgagatccagtacacttccaactacaacaaatctgttaatgtggactttactgtggacgctaatggtgtgtattcagagcctcgccccattggcaccagatacctgactcgtaatctgtaa

SEQ ID NO: 12344 - DNA, 2208 bp, Artificial Sequence
  source: /note="Description of Artificial Sequence: Synthetic polynucleotide"
atggctgccgatggttatcttccagattggctcgaggacactctctctgaaggaataagacagtggtggaagctcaaacctggcccaccaccaccaaggcccgcagagcggcatcaggacgacagcaggggtcttgtgcttcctgggtacaagtacctcggacccttcaacggactcgacaaaggagagccggtcaacgaggcagacgctgcggccctcgagcacgacaaggcctacgaccggcagctcgacagcggagacaacccgtacctcaagtacaaccacgccgacgcggagtttcaggagcgtcttaaagaagatacgtcttttgggggcaacctcggacgagcagtcttccaggcgaaaaagagggttcttgaacctctgggcctggttgaggaacctgttaagacggctccgggaaaaaagaggccggtagagcactctcctgcggagccagactcctcctcgggaaccggaaaagcgggccagcagcctgcaagaaagagattgaatttcggtcagactggagacgcagactccgtacctgacccccagcctctcggacagccaccagcagcccccacaagtttgggatctactacaatggctacaggcagtggcgcaccaatggcagacaataacgagggtgccgatggagtgggtaattcctcaggaaattggcattgcgattcccaatggctgggcgacagagtcatcaccaccagcacccgaacctgggccctgcccacctacaacaaccacctctacaagcaaatctccagccaatcaggagcatcgaacgacaaccactactttggctacagcaccccttgggggtattttgacttcaacagattccactgtcacttctccccacgtgactggcaaagactcatcaacaacaactggggattccgacccaagagactcaacttcaagctctttaacattcaagtcaaagaggtcacgcagaatgacggtacgacgacgattgccaataaccttaccagcacgattcaggtgtttactgactcggagtaccagctcccgtacgtcctcggctcggcgcatcaaggatgcctcccgccgtttccagcggacgtcttcatggtcccacagtatggatacctcaccctgaacaacgggagtcaggcggtaggacgctcttccttttactgcctggagtactttccttctcagatgctgcgtaccggaaacaactttaccttcagctacacctttgaggacgtgcccttccacagcagctacgctcacagccagagtttggaccggctgatgaatcctctgatcgaccagtatctgtattatctgaacaggacacaatcaaatagtggaactcttcagcagtctaggctactgtttagccaagctggacccaccagcatgtcccttcaagctaaaaactggctgcctggaccttgctacagacagcagcgtctgtcaaagcaggcaaacgacaacaacaacagcaactttccctggactgcggctacaaagtatcatctaaatggtcgggactcgttggttaatccaggaccagctatggccagccacaaagacgatgaagaaaagtttttccccatgcatggaaccctgatatttggtaaacaaggaacaaatgctaacgacgcggatttggaacatgtcatgattacagatgaagaagaaatcaggaccaccaatcccgtggctacagagcagtacggaaacgtgtcaaataatttgcaaaactcaaatactggtccaactacagaaaatgtcaatcaccagggagcgttacctggtatggtgtggcaggatcgagacgtgtacctgcagggacccatttgggccaagattcctcacaccgacggacactttcacccttctccactgatgggaggttttggactcaaacacccgcctcctcaaatcatgatcaaaaacactcctgttccagccaatccccctacaaacttcagcgcggcaaagtttgcttccttcatcacacagtattccacgggacaggtcagcgtggagatcgagtgggagctgcagaaggagaacagcaaacgctggaaccccgagatccagtacacttccaactacaacaaatctgttaatgtggactttactgtggacgctaatggtgtgtattcagagcctcgccccattggcaccagacacctgactcgtaatctgtaa

SEQ ID NO: 12345 - DNA, 2208 bp, Artificial Sequence
  source: /note="Description of Artificial Sequence: Synthetic polynucleotide"
atggctgccgatggttatcttccagattggctcgaggacactctctctgaaggaataagacagtggtggaagctcaaacctggcccaccaccaccaaggcccgcagagcggcatcaggacgacagcaggggtcttgtgcttcctgggtacaagtacctcggacccttcaacggactcgacaaaggagagccggtcaacgaggcagacgctgcggccctcgagcacgacaaggcctacgaccggcagctcgacagcggagacaacccgtacctcaagtacaaccacgccgacgcggagtttcaggagcgtcttaaagaagatacgtcttttgggggcaacctcggacgagcagtcttccaggcgaaaaagagggttcttgaacctctgggcctggttgaggaacctgttaagacggctccgggaaaaaagaggccggtagagcactctcctgcggagccagactcctcctcgggaaccggaaaagcgggccagcagcctgcaagaaagagattgaatttcggtcagactggagacgcagactccgtacctgacccccagcctctcggacagccaccagcagcccccacaagtttgggatctactacaatggctacaggcagtggcgcaccaatggcagacaataacgagggtgccgatggagtgggtaattcctcaggaaattggcattgcgattcccaatggctgggcgacagagtcatcaccaccagcacccgaacctgggccctgcccacctacaacaaccacctctacaagcaaatctccagccaatcaggagcatcgaacgacaaccactactttggctacagcaccccttgggggtattttgacttcaacagattccactgtcacttctccccacgtgactggcaaagactcatcaacaacaactggggattccgacccaagagactcaacttcaagctctttaacattcaagtcaaagaggtcacgcagaatgacggtacgacgacgattgccaataaccttaccagcacggttcaggtgtttactgactcggagtaccagctcccgtacgtcctcggctcggcgcatcaaggatgcctcccgccgtttccagcggacgtcttcatggtcccacagtatggatacctcaccctgaacaacgggagtcaggcggtaggacgctcttccttttactgcctggagtactttccttctcagatgctgcgtaccggaaacaactttaccttcagctacacctttgaggacgtgcccttccacagcagctacgctcacagccagagtttggaccggctgatgaatcctctgatcgaccagtatctgtattatctgaacaggacacaatcaaatagtggaactcttcagcagtctgggctactgtttagccaagctggacccaccagcatgtcccttcaagctaaaaactggctgcctggaccttgctacagacagcagcgtctgtcaaagcaggcaaacgacaacaacaacagcaactttccctggactgcggctacaaagtatcatctaaatggtcgggactcgttggttaatccaggaccagctatggccagccacaaagacgatgaagaaaagtttttccccatgcatggaaccctgatatttggtaaacaaggaacaaatgctaacgacacggatttggaacatgtcatgattacagatgaagaagaaatcaggaccaccaatcccgtggctacagagcagtacggaaacgtgtcaaataatttgcaaaactcaaatactggtccaactacagaaaatgtcaatcaccagggagcgttacctggtatggtgtggcaggatcgagacgtgtacctgcagggacccatttgggccaagattcctcacaccgacggacactttcacccttctccactgatgggaggttttggactcaaacacccgcctcctcaaatcatgatcaaaaacactcctgttccagccaatcctcctacaaacttcagcgcggcaaagtttgcttccttcatcacacagtattccacgggacaggtcagcgtggagatcgagtgggagctgcagaaggagaacagcaaacgctggaaccccgagatccagtacacttccaactacaacaaatctgttaatgtggactttactgtggacgctaatggtgtgtattcagagcctcgccccattggcaccagatacctgactcgtaatctgtaa

SEQ ID NO: 12346 - DNA, 2208 bp, Artificial Sequence
  source: /note="Description of Artificial Sequence: Synthetic polynucleotide"
atggctgccgatggttatcttccagattggctcgaggacactctctctgaaggaataagacagtggtggaagctcaaacctggcccaccaccaccaaggcccgcagagcggcatcaggacgacagcaggggtcttgtgcttcctgggtacaagtacctcggacccttcaacggactcgacaaaggagagccggtcaacgaggcagacgctgcggccctcgagcacgacaaggcctacgaccggcagctcgacagcggagacaacccgtacctcaagtacaaccacgccgacgcggagtttcaggagcgtcctaaagaagatacgtcttttgggggcaacctcggacgagcagtcttccaggcgaaaaagagggttcttgaacctctgggcctggttgaggaacctgttaagacggctccgggaaaaaagaggccggtagagcactctcctgcggagccagactcctcctcgggaaccggaaaagcgggccagcagcctgcaagaaagagattgaatttcggtcagactggagacgcagactccgtacctgacccccagcctctcggacagccaccagcagcccccacaagtttgggatctactacaatggctacaggcagtggcgcaccaatggcagacaataacgagggtgccgatggagtgggtaattcctcaggaaattggcattgcgattcccaatggctgggcgacagagtcatcaccaccagcacccgaacctgggccctgcccacctacaacaaccacctctacaagcaaatctccagccaatcaggagcatcgaacgacaaccactactttggctacagcaccccttgggggtattttgacttcaacagattccactgtcacttctccccacgtgactggcaaagactcattaacaacaactggggattccgacccaagagactcaacttcaagctctttaacattcaagtcaaagaggtcacgcagaatgacggtacgacgacgattgccaataaccttaccagcacggttcaggtgtttactgactcggagtaccagctcccgtacgtcctcggctcggcgcatcaaggatgcctcccgccgtttccagcggacgtcttcatggtcccacagtatggatacctcaccctgaacaacgggagtcaggcggtaggacgctcttccttttactgcctggagtactttccttctcagatgctgcgtaccggaaacaactttaccttcagctacacctttgaggacgtgcccttccacagcagctacgctcacagccagagtttggaccggctgatgaatcctctgatcgaccagtatctgtattatctgaacaggacacaatcaaatagtggaactcttcagcagtctaggctactgtttagccaagctggacccaccagcatgtcccttcaagctaaaaactggctgcctggaccttgctacagacagcagcgtctgtcaaagcaggcaaacgacaacaacaacagcaactttccctggactgcggctacaaagtatcatctaaatggtcgggactcgttggttaatccaggaccagctatggccagccacaaagacgatgaagaaaagtttttccccatgcatggaaccctgatatttggtaaacaaggaacaaatgctaacgacgcggatttggaacatgtcatgattacagatgaagaagaaatcaggaccaccaatcccgtggctacagagcagtacggaaacgtgtcaaataatttgcaaaactcaaatactggtccaactacagaaaatgtcaatcaccagggagcgttacctggtatggtgtggcaggatcgagacgtgtacctgcagggacccatttgggccaagattcctcacaccgacggacactttcacccttctccactgatgggaggttttggactcaaacacccgcctcctcaaatcatgatcaaaaacactcctgttccagccaatcctcctacaaacttcagcgcggcaaagtttgcttccttcatcacacggtattccacgggacaggtcagcgtggagatcgagtgggagctgcagaaggagaacagcaaacgctggaaccccgagatccagtacacttccaactacaacaaatctgttaatgtggactttactgtggacgctaatggtgtgtattcagagcctcgccccattggcaccagatacctgactcgtaatctgtaa

SEQ ID NO: 12347 - DNA, 2208 bp, Artificial Sequence
  source: /note="Description of Artificial Sequence: Synthetic polynucleotide"
atggctgccgatggttatcttccagattggctcgaggacactctctctgaaggaataagacagtggtggaagctcaaacctggcccaccaccgccaaagcccgcagagcggcataaggacgacagcaggggtcttgtgcttcctgggtacaagtacctcggacccttcaacggactcgacaagggagagccggtcaacgaggcagacgccgcggccctcgagcacgacaaggcctacgaccggcagctcgacagcggagacaacccgtacctcaagtacaaccacgccgacgcggagcttcaggagcgccttaaagaagatacgtcttttgggggcaacctcggacgagcagtattccaggcgaaaaagagggttcttgaacctctgggcctggttgaggagcctgttaagacggctccgggaaaaaagaggccggtagagcactctcctgtggagccagactcctcctcgggaaccggaaaagcgggccagcagcctgcgagaaagagattgaattttggtcagactggagacgcagactccgtacctgacccccagcctctcggacagccaccagcagcccccacaagtttgggatctactacaatggctacaggcagtggcgcaccaatggcagacaataacgagggtgccgatggagtgggtaattcctcaggaaattggcattgcgattcccaatggtcgggcgacagagtcatcaccaccagcacccgaacctgggccctgcccacctacaacaaccacctctacaagcaaatctccagccaatcaggagccagcaacgacaaccactactttggctacagcaccccctgggggtattttgacttcaacagattccactgccacttttcaccacgtgactggcaaagactcatcaacaacaactggggattccgacccaagagactcaacttcaagctctttaacattcaagtcaaaggggtcacgcagaatgacggtacgacgacgattgccaataaccttaccagcacggttcaggtgtttactgactcggagtaccagctcccgtacgtcctcggctcggcgcatcaaggatgcctcccgccgtttccagcggacgtcttcatggtcccacagtatggatacctcaccctgaacaacgggagtcaggcggtaggacgctcttccttttactgcctggagtactttccttctcagatgcttcgtaccggaaacaactttaccttcagttacacctttgaagacgttcctttccacagcagctacgctcacagtcaaagtctggaccggctgatgaatcctcttatcgaccagtacctgtattatctaaacaaaacacaatcaaatagtggaactcttcagcagtctcggctactgtttagtcaagctggacctaccagcatgtctcttcaagctaaaaactggctgcctggaccttgctacagacaacagcgtctgtcaaagcaggcaaacgacaacaacaacagcaactttccctggactgcggctacaaagtatcatctaaatggccgggactcgttggttaatccaggaccagctatggccagccacaaagacgatgaagaaaagtttttccccatgcatggaaccctgatatttggcaaacaaggaacaaatgctaacgacgcggatttggacaatgtcatgattacagatgaagaagaaatccgtaccaccaatcccgtggctacggagcagtacgggactgtgtcaaataatttgcaaaactcaaatactggtccaactactggaactgtcaatcaccaaggagcgttacctggtatggtgtggcaggatcgagacgtgtaccttcagggacccatttgggccaagattcctcacaccgatggacactttcacccttctccgctgatgggaggttttggactcaaacacccgcctcctcagatcatgatcaaaaacactcccgttccagccaatcctcccacaaacttcagttctgccaagtttgcttctttcatcacacagtattccacgggacaggttagcgtggagatcgagtgggagctgcagaaggagaacagcaaacgctggaaccccgagatccagtacacttccaactacaacaagtctgttaatgtggactttactgtggacactaatggtgtgtattcagagcctcgccccattggcaccagatacctgactcgtaatctgtaa

SEQ ID NO: 12348 - DNA, 2208 bp, Artificial Sequence
  source: /note="Description of Artificial Sequence: Synthetic polynucleotide"
atggctgccgatggttatcttccagattggctcgaggacattctctctgaaggaataagacagtggtggaagctcaaacctggcccaccaccaccaaagcccgcagagcggcataaggacgacagcaggggtcttgtgcttcctgggtacaagtacctcggacccttcaacggactcgacaaaggagagccggtcaacgaggcagacgccgcggccctcgagcacgacaaggcctacgaccggcagctcgacagcggagacaacccgtacctcaagtacaaccacgccgacgcggagtttcaggagcgtcttaaagaagatacgtcttttgggggcaacctcggacgagcagtcttccaggcaaaaaagagggttcttgaacctctgggcctggttgaggaacctgttaagacggctccgggaaaaaagaggccggtagagcaatctcctgcggagccagactcctcctcgggaaccggaaaggcgggcaaccagcctgcaagaaagagattgaattttggtcagactggagacgcagactccgtacctgacccccagcctctcggacatccaccagcagccccctctggtctgggatctactacaatggctacaggcagtggcgcaccaatggcagacaataacgagggtgccgatggagtgggtaattcctcaggaaattggcattgcgattcccaatggttgggcgacagagtcatcaccaccagcacccgaacctgggccctgcccacctacaacaatcacctctacaagcaaatctccagccaatcaggagccagcaacgacaaccactactttggctacagcaccccctgggggtattttgacttcaacagattccactgccacttttcaccacgtgactggcaaagactcatcaacaacaactggggattccgacccaaaagactcaacttcaagctctttaacattcaagtcaaagaggtcacgcagaatgacggtacgacgacgattgccaataaccttaccagcacggttcaggtgtttactgactcggagtaccagctcccgtacgtcctcggctcggcgcatcaaggatgcctcccgccgtttccagcggacgtcttcatggtcccacagtatggatacctcaccctgaacaacgggagtcaggcggtaggacgctcttccttttactgcctggagtactttccttctcagatgcttcgtaccggaaacaactttaccttcagttacacctttgaagacgttcctttccacagcagctacgctcacagtcaaagtctggaccggctgatgaatcctctgatagaccagtacctgtattatctaaacaaaacacaatcaaatagtggaactcttcagcagtctcggctactgtttagtcaagctggacccaccagcatgtctcttcaagctaaaaactggctgcctggaccttgctacagacaacagcgtctgtcaaagcaggcaaacgacaacaacaacagcaactttccctggactgcggctacaaagtatcatctaaatggccgggactcgttggttaatccaggaccagctatggccagccacaaagacgatgaagaaaagtttttccccatgcatggaaccctgatatttggtaaacaaggaacaaatgctaacgacgcggatttggacaatgtcatgattacagatgaagaagaaatccgcaccaccaatcccgtggctacggagcagtacgggactgtgtcaaataatttgcaaaactcaaatactggtccaactactggaactgtcaatcaccaaggagcgttacctggtatggtgtggcaggatcgagacgtgtaccttcagggacccatttgggccaagattcctcacaccgatggacactttcatccttctccactgatgggaggttttggactcaaacacccgcctcctcagatcatgatcaaaaacactcccgttccagccaatcctcctacaaacttcagttctgccaagtttgcttctttcatcacacagtattccacggggcaggtcagcgtggagatagagtgggagctgcagaaggagaacagcaaacgctggaaccccgagatccagtatacttccaactacaacaagtctgttaatgtggactttactgtggacactaatggtgtgtattcagagcctcgccccattggcaccagatacctgactcgtaatctgtaa

SEQ ID NO: 12349 - DNA, 2208 bp, Artificial Sequence
  source: /note="Description of Artificial Sequence: Synthetic polynucleotide"
atggctgccgatggttatcttccagattggctcgaggacattctctctgaaggaataagacagtggtggaagctcaaacctggcccaccaccaccaaagcccgcagagcggcataaggacgacagcaggggtcttgtgcttcctgggtacaagtacctcggacccttcaacggactcgacaaaggagagccggtcaacgaggcagacgccgcggccctcgagcacgacaaggcctacgaccggcagctcgacagcggagacaacccgtacctcaagtacaaccacgccgacgcggagtttcaggagcgtcttaaagaagatacgtcttttgggggcaacctcggacgagcagtcttccaggcaaaaaagagggttcttgaacctctgggcctggttgaggaacctgttaagacggctccgggaaaaaagaggccggtagagcaatctcctgcggagccagactcctcctcgggaaccggaaaggcgggcaaccagcctgcaagaaagagattgaattttggtcagactggagacgcagactccgtacctgacccccagcctctcggacagccaccagcagccccctctggtctgggatctactacaatggctacaggcagtggcgcaccaatggcagacaataacgagggtgccgatggagtgggtaattcctcaggaaattggcattgcgattcccaatggttgggcgacagagtcatcaccaccagcacccgaacctgggccctgcccacctacaacaatcacctctacaagcaaatctccagccaatcaggagccagcaacgacaaccactactttggctacagcaccccctgggggtattttgacttcaacagattccactgccacttttcaccacgtgactggcaaagactcatcaacaacaactggggattccgacccaaaagactcaacttcaagctctttaacattcaagtcaaagaggtcacgcagaatgacggtacgacgacgattgccaataaccttaccagcacggttcaggtgtttactgactcggagtaccagctcccgtacgtcctcggctcggcgcatcaaggatgcctcccgccgtttccagcggacgtcttcatggtcccacagtatggatacctcaccctgaacaacgggagtcaggcggtaggacgctcttccttttactgcctggagtactttccttctcagatgcttcgtaccggaaacaactttaccttcagttacacctttgaagacgttcctttccacagcagctacgctcacagtcaaagtctggaccggctgatgaatcctctgatagaccagtacctgtattatctaaacaaaacacaatcaaatagtggaactcttcagcagtctcggctactgtttagtcaagctggacccaccagcatgtctcttcaagctaaaaactggctgcctggaccttgctacagacaacagcgtctgtcaaagcaggtaaacgacaacaacaacagcaactttccctggactgcggctacaaagtatcatctaaatggccgggactcgttggttaatccaggaccagctatggccagccacaaagacgatgaagaaaagtttttccccatgcatggaaccctgatatttggtaaacaaggaacaaatgctaacgacgcggatttggacaatgtcatgattacagatgaagaagaaatccgcaccaccaatcccgtggctacggagcagtacgggactgtgtcaaataatttgcaaaactcaaatactggtccaactactggaactgtcaatcaccaaggagcgttacctggtatggtgtggcaggatcgagacgtgtaccttcagggacccatttgggccaagattcctcacaccgatggacactttcatccttctccactgatgggaggttttggactcaaacacccgcctcctcagatcatgatcaaaaacactcccgttccagccaatcctcctacaaacttcagttctgccaagtttgcttctttcatcacacagtattccacggggcaggtcagcgtggagatagagtgggagctgcagaaggagaacagcaaacgctggaaccccgagatccagtatacttccaactacaacaagtctgttaatgtggactttactgtggacactaatggtgtgtattcagagcctcgccccattggcaccagatacctgactcgtaatctgtaa

SEQ ID NO: 12350 - DNA, 2208 bp, Artificial Sequence
  source: /note="Description of Artificial Sequence: Synthetic polynucleotide"
atggctgccgatggttatcttccagattggctcgaggacattctctctgaaggaataagacagtggtggaagctcaaacctggcccaccaccaccaaagcccgcagagcggcataaggacgacagcaggggtcttgtgcttcctgggtacaagtacctcggacccttcaacggactcgacaaaggagagccggtcaacgaggcagacgccgcggccctcgagcacgacaaggcctacgaccggcagctcgacagcggagacaacccgtacctcaagtacaaccacgccgacgcggagtttcaggagcgtcttaaagaagatacgtcttttgggggcaacctcggacgagcagtcttccaggcaaaaaagagggttcttgaacctctgggcctggttgaggaacctgttaagacggctccgggaaaaaagaggccggtagagcaatctcctgcggagccagactcctcctcgggagccggaaaggcgggcaaccagcctgcaagaaagagattgaattttggtcagactggagacgcagactccgtacctgacccccagcctctcggacagccaccagcagccccctctggtctgggatctactacaatggctacaggcagtggcgcaccaatggcagacaataacgagggtgccgatggagtgggtaattcctcaggaaattggcattgcgattcccaatggttgggcgacagagtcatcaccaccagcacccgaacctgggccctgcccacctacaacaatcacctctacaagcaaatctccagccaatcaggagccagcaacgacaaccactactttggctacagcaccccctgggggtattttgacttcaacagattccactgccacttttcaccacgtgactggcaaagactcatcaacaacaactggggattccgacccaaaagactcaacttcaagctctttaacattcaagtcaaagaggtcacgcagaatgacggtacgacgacgattgccaataaccttaccagcacggttcaggtgtttactgactcggagtaccagctcccgtacgtcctcggctcggcgcatcaaggatgcctcccgccgtttccagcggacgtcttcatggtcccacagtatggatacctcaccctgaacaacgggagtcaggcggtaggacgctcttccttttactgcctggagtactttccttctcagatgcttcgtaccggaaacaactttaccttcagttacacctttgaagacgttcctttccacagcagctacgctcacagtcaaagtctggaccggctgatgaatcctctgatagaccagtacctgtattatctaaccaaaacacaatcaaatagtggaactcttcagcagtctcggctactgtttagtcaagctggacccaccagcatgtctcttcaagctaaaaactggctgcctggaccttgctacagacaacagcgtctgtcaaagcaggcaaacgacaacaacaacagcaactttccctggactgcggctacaaagtatcatctaaatggccgggactcgttggttaatccaggaccagctatggccagccacaaagacgatgaagaaaagtttttccccatgcatggaaccctgatatttggtaaacaaggaacaaatgctaacgacgcggatttggacaatgtcatgattacagatgaagaagaaatccgcaccaccaatcccgtggctacggagcagtacgggactgtgtcaaataatttgcaaaactcaaatactggtccaactactggaactgtcgatcaccaaggagcgttacctggtatggtgtggcaggatcgagacgtgtaccttcagggacccatttgggccaagattcctcacaccgatggacactttcatccttctccactgatgggaggttttggactcaaacacccgcctcctcagatcatgatcaaaaacactcccgttccagccaatcctcctacaaacttcagttctgccaagtttgcttctttcatcacacagtattccacggggcaggtcagcgtggagatagagtgggagctgcagaaggagaacagcaaacgctggaaccccgagatccagtatacttccaactacaacaagtctgttaatgtggactttactgtggacactaatggtgtgtattcagagcctcgccccattggcaccagatacctgactcgtaatctgtaa

SEQ ID NO: 12351 - DNA, 2208 bp, Artificial Sequence
  source: /note="Description of Artificial Sequence: Synthetic polynucleotide"
atggctgccgatggttatcttccagattggctcgaggacattctctctgaaggaataagacagtggtggaagctcaaacctggcccaccaccaccaaagcccgcagagcggcataaggacgacagcaggggtcttgtgcttcctgggtacaagtacctcggacccttcaacggactcgacaaaggagagccggtcaacgaggcagacgccgcggccctcgagcacgacaaggcctacgaccggcagctcgacagcggagacaacccgtacctcaagtacaaccacgccgacgcggagtttcaggagcgtcttaaagaagatacgtcttttgggggcaacctcggacgagcagtcttccaggcaaaaaagagggttcttgaacctctgggcctggttgaggaacctgttaagacggctccgggaaaaaagaggccggtagagcaatctcctgcggagccagactcctcctcgggaaccggaaaggcgggcaaccagcctgcaagaaagagattgaattttggtcagactggagacgcagactccgtacctgacccccagcctctcggacagccaccagcagccccctctggtctgggatctactacaatggctacaggcagtggcgcaccaatggcagacaataacgagggtgccgatggagtgggtaattcctcaggaaattggcattgcgattcccaatggttgggcgacagagtcatcaccaccagcacccgaacctgggccctgcccacctacaacaatcacctctacaagcaaatctccagccaatcaggagccagcaacgacaaccactactttggctacagcaccccctgggggtattttgacttcaacagattccactgccacttttcaccacgtgactggcaaagactcatcaacaacaactggggattccgacccaaaagactcaacttcaagctctttaacattcaagtcaaagaggtcacgcagaatgacggtacgacgacgattgccaataaccttaccagcacggttcaggtgtttactgactcggagtaccagctcccgtacgtcctcggctcggcgcatcaaggatgcctcccgccgtttccagcggacgtcttcatggtcccacagtatggatacctcaccctgaacaacgggagtcaggcggtaggacgctcttccttttactgcctggagtactttccttctcagatgcttcgtaccggaaacaactttaccttcagttacacctttgaagacgttcctttccacagcagctacgctcacagtcaaagtctggaccggctgatgaatcctctgatagaccagtacctgtattatctaaacaaaacacaatcaaatagtggaactcttcagcagtctcggctactgcttagtcaagctggacccaccagcatgtctcttcaagctaaaaactggctgcctggaccttgctacagacaacagcgtctgtcaaagcaggcaaacgacaacaacaacagcaactttccctggactgcggctacaaagtatcatctaaatggccgggactcgttggttaatccaggaccagctatggccagccacaaagacgatgaagaaaagtttttccccatgcatggaaccctgatatttggtaaacaaggaacaaatgctaacgacgcggatttggacaatgtcatgattacagatgaagaagaaatccgcaccaccaatcccgtggctacggagcagtacgggactgtgtcaaataatttgcaaaactcaaatactggtccaactactggaactgtcaatcaccaaggagcgttacctggtatggtgtggcaggatcgagacgtgtaccttcagggacccatttgggccaagattcctcacaccgatggacactttcatccttctccactgatgggaggttttggactcaaacacccgcctcctcagatcatgatcaaaaacactcccgttccagccaatcctcctacaaacttcagttctgccaagtttgcttctttcatcacacagtattccacggggcaggtcagcgtggagatagagtgggagctgcagaaggagaacagcaaacgctggaaccccgagatccagtatacttccaactacaacaagtctgttaatgtggactttactgtggacactaatggtgtgtattcagagcctcgccccattggcaccagatacctgactcgtaatctgtaa

SEQ ID NO: 12352 - DNA, 2208 bp, Artificial Sequence
  source: /note="Description of Artificial Sequence: Synthetic polynucleotide"
atggctgccgatggttatcttccagattggctcgaggacactctctctgaaggaataagacagtggtggaagctcaaacctggcccaccaccgccaaagcccgcagagcggcataaggacgacagcaggggtcttgtgcttcctgggtacaagtacctcggacccttcaacggactcgacaagggagagccggtcaacgaggcagacgccgcggccctcgagcacgacaaggcctacgaccggcagctcgacagcggagacaacccgtacctcaagtacaaccacgccgacgcggagtttcaggagcgccttaaagaagatacgtcttttgggggcaacctcggacgagcagtattccaggcgaaaaagagggttcttgaacctctgggcctggttgaggagcctgttaagacggctccgggaaaaaagaggccggtagagcactctcctgtggagccagactcctcctcgggaaccggaaaagcgggccagcagcctgcgagaaagagattgaattttggtcagactggagacgcagactccgtacctgacccccagcctctcggacagccaccagcagcccccacaagtttgggatctactacaatggctacaggcagtggcgcaccaatggcagacaataacgagggtgccgatggagtggataattcctcaggaaattggcattgcgattcccaatggtcgggcgacagagtcatcaccaccagcacccgaacctgggccctgcccacctacaacaaccacctctacaagcaaatctccagccaatcaggagccagcaacgacaaccactactttggctacagcaccccctgggggtattttgacttcaacagattccactgccacttttcaccacgtgactggcaaagactcatcaacaacaactggggattccgacccaagagactcaacttcaagctctttaacattcaagtcaaagaggtcacgcagaatgacggtacgacgacgattgccaataaccttaccagcacggttcaggtgtctactgactcggagtaccagctcccgtacgtcctcggctcggcgcatcaaggatgcctcccgccgtttccagcggacgtcttcatggtcccacagtatggatacctcaccctgaacaacgggagtcaggcggtaggacgctcttccttttactgcctggagtactttccttctcagatgcttcgtaccggaaacaactttaccttcagttacacctttgaagacgttcctttccacagcagctacgctcacagtcaaagtctggaccggctgatgaatcctcttatcgaccagtacctgtattatctaaacaaaacacaatcaaatagtggaactcttcagcagtctcggctactgtttagtcaagctggacctaccagcatgtctcttcaagctaaaaactggctgcctggaccttgctacagacaacagcgtctgtcaaagcaggcaaacgacaacaacaacagcaactttccctggactgcggctacaaagtatcatctaaatggccgggactcgttggttaatccaggaccagctatggccagccacaaagacgatgaagaaaagtttttccccatgcatggaaccctgatatttggcaaacaaggaacaaatgctaacgacgcggatttggacaatgtcatgattacagatgaagaagaaatccgtaccaccaatcccgtggctacggagcagtacgggactgtgtcaaataatttgcaaaactcaaatactggtccaactactggaactgtcaatcaccaaggagcgttacctggtatggtgtggcaggatcgagacgtgtaccttcagggacccatttgggccaagattcctcacaccgatggacactttcacccttctccgctgatgggaggttttggactcaaacacccgcctcctcagatcatgatcaaaaacactcccgttccagccaatcctcccacaaacttcagttctgccaagtttgcttctttcatcacacagtattccacgggacaggttagcgtggagatcgagtgggagctgcagaaggagaacagcaaacgctggaaccccgagatccagtacacttccaactacaacaagtctgttaatgtggactttactgtggacactaatggtgtgtattcagagcctcgccccattggcaccagatacctgactcgtaatctgtaa

SEQ ID NO: 12353 - DNA, 2208 bp, Artificial Sequence
  source: /note="Description of Artificial Sequence: Synthetic polynucleotide"
atggctgccgatggttatcttccagattggctcgaggacactctctctgaaggaataagacagtggtggaagctcaaacctggcccaccaccgccaaagcccgcagagcggcataaggacgacagcaggggtcttgtgcttcctgggtacaagtacctcggacccttcaacggactcgacaagggagagccggtcaacgaggcagacgccgcggccctcgagcacgacaaggcctacgaccggcagctcgacagcggagacaacccgtacctcaagtacaaccacgccgacgcggagtttcaggagcgccttaaagaagatacgtcttttgggggcaacctcggacgagcagtattccaggcgaaaaagagggttcttgaacctctgggcctggttgaggagcctgttaagacggctccgggaaaaaagaggccggtagagcactctcctgtggagccagactcctcctcgggaaccggaaaagcgggccagcagcctgcgagaaagagattgaattttggtcagactggagacgcagactccgtacctgacccccagcctctcggacagccaccagcagcccccacaagtttgggatctactacaatggctacaggcagtggcgcaccaatggcagacaataacgagggtgccgatggagtgggtaattcctcaggaaattggcattgcgattcccaatggtcgggcgacagagtcatcaccaccagcacccgaacctgggccctgcccacctacaacaaccacctctacaagcaaatctccagccaatcaggagccagcaacgacaaccactactttggctacagcaccccctgggggtattttgacttcaacagattccactgccacttttcaccacgtgactggcaaagactcatcaacaacaactggggattccgacccaagagactcaacttcaagctctttaacattcaagtcaaagaggtcacgcagaatgacggtacgacgacgattgccaataaccttaccagcacggttcaggtgtttactgactcggagtaccagctcccgtacgtcctcggctcggcgcatcaaggatgcctcccgccgtttccggcggacgtcttcatggtcccacagtatggatacctcaccctgaacaacgggagtcaggcggtaggacgctcttccttttactgcctggagtactttccttctcagatgcttcgtaccggaaacaactttaccttcagttacacctttgaagacgttcctttccacagcagctacgctcacagtcaaagtctggaccggctgatgaatcctcttatcgaccagtacctgtattatctaaacaaaacacaatcaaatagtggaactcttcagcagtctcggctactgtttagtcaagctggacctaccagcatgtctcttcaagctaaaaactggctgcctggaccttgctgcagacaacagcgtctgtcaaagcaggcaaacgacaacaacaacagcaactttccctggactgcggctacaaagtatcatctaaatggccgggactcgttggttaatccaggaccagctatggccagccacaaagacgatgaagaaaagtttttccccatgcatggaaccctgatatttggcaaacaaggaacaaatgctaacgacgcggatttggacaatgtcatgattacagatgaagaagaaatccgtaccaccaatcccgtggctacggagcagtacgggactgtgtcaaataatttgcaaaactcaaatactggtccaactactggaactgtcaatcaccaaggagcgttacctggtatggtgtggcaggatcgagacgtgtaccttcagggacccatttgggccaagattcctcacaccgatggacactttcacccttctccgctgatgggaggttttggactcaaacacccgcctcctcagatcatgatcaaaaacactcccgttccagccaatcctcccacaaacttcagttctgccaagtttgcttctttcatcacacagtattccacgggacaggttagcgtggagatcgagtgggagctgcagaaggagaacagcaaacgctggaaccccgagatccagtacacttccaactacaacaagtctgttaatgtggactttactgtggacactaatggtgtgtattcagagcctcgccccattggcaccagatacctgactcgtaatctgtaa

SEQ ID NO: 12354 - DNA, 2208 bp, Artificial Sequence
  source: /note="Description of Artificial Sequence: Synthetic polynucleotide"
atggctgccgatggttatcttccagattggctcgaggacattctctctgaaggaataagacagtggtggaagctcaaacctggcccaccaccaccaaagcccgcagagcggcataaggacgacagcaggggtctcgtgcttcctgggtacaagtacctcggacccttcaacggactcgacaaaggagagccggtcaacgaggcagacgccgcggccctcgagcacgacaaggcctacgaccggcagctcgacagcggagacaacccgtacctcaagtacaaccacgccgacgcggagtttcaggagcgtcttaaagaagatacgtcttttgggggcaacctcggacgagcagtcttccaggcaaaaaagagggttcttgaacctctgggcctggttgaggaacctgttaagacggctccgggaaaaaagaggccggtagagcaatctcctgcggagccagactcctcctcgggaaccggaaaggcgggcaaccagcctgcaagaaagagattgaattttggtcagactggagacgcagactccgtacctgacccccagcctctcggacagccaccagcagccccctctggtctgggatctactacaatggctacaggcagtggcgcaccaatggcagacaataacgagggtgccgatggagtgggtaattcctcaggaaattggcattgcgattcccaatggttgggcgacagagtcatcaccaccagcacccgaacctgggccctgcccacctacaacaatcacctctacaagcaaatctccagccaatcaggagccagcaacgacaaccactactttggctacagcaccccctgggggtattttgacttcaacagattccactgccacttttcaccacgtgactggcaaagactcatcaacaacaactggggattccgacccaaaagactcaacttcaagctctttaacattcaagtcaaagaggtcacgcagaatgacggtacgacgacgattgccaataaccttaccagcacggttcaggtgtttactgactcggagtaccagctcccgtacgtcctcggctcggcgcatcaaggatgcctcccgccgtttccagcggacgtcttcatggtcccacagtatggatacctcaccctgaacaacgggagtcaggcggtaggacgctcttccttttactgcctggagtactttccttctcagatgcttcgtaccggaaacaactttaccttcagttacacctttgaagacgttcctttccacagcagctacgctcacagtcaaagtctggaccggctgatgaatcctctgatagaccagtacctgtattatctaaacaaaacacaatcaaatagtggaactcttcagcagtctcggctactgtttagtcaagctggacccaccagcatgtctcttcaagctaaaaactggctgcctggaccttgctacagacaacagcgtctgtcaaagcaggcaaacgacaacaacaacagcaactttccctggactgcggctacaaagtatcatctaaatggccgggactcgttggttaatccaggaccagctatggccagccacaaagacgatgaagaaaagtttttccccatgcatggaaccctgatatttggtaaacaaggaacaaatgctaacgacgcggatttggacaatgtcatgattacagatgaagaagaaatccgcaccaccaatcccgtggctacggagcagtacgggactgtgtcaaataatttgcaaaactcaaatactggtccaactactggaactgtcaatcaccaaggagcgttacctggtatggtgtggcaggatcgagacgtgtaccttcagggacccatttgggccaagattcctcacaccgatggacactttcatccttctccactgatgggaggttttggactcaaacacccgcctcctcagatcatgatcaaaaacactcccgttccagccaatcctcctacaaacttcagttctgccaagtttgcttctttcatcacacagtattccacggggcaggtcagcgtggagatagagcgggagctgcagaaggagaacagcaaacgctggaaccccgagatccagtatacttccaactacaacaagtctgttaatgtggactttactgtggacactaatggtgtgtattcagagcctcgccccattggcaccagatacctgactcgtaatctgtaa

SEQ ID NO: 12355 - DNA, 2208 bp, Artificial Sequence
  source: /note="Description of Artificial Sequence: Synthetic polynucleotide"
atggctgccgatggttatcttccagattggctcgaggacattctctctgaaggagtaagacagtggtggaagctcaaacctggcccaccaccaccaaagcccgcagagcggcataaggacgacagcaggggtcttgtgcttcctgggtacaagtacctcggacccttcaacggactcgacaaaggagagccggtcaacgaggcagacgccgcggccctcgagcacgacaaggcctacgaccggcagctcgacagcggagacaacccgtacctcaagtacaaccacgccgacgcagagtttcaggagcgtcttaaagaagatacgtcttttgggggcaacctcggacgagcagtcttccaggcaaaaaagagggttcttgaacctctgggcctggttgaggaacctgttaagacggctccgggaaaaaagaggccggtagagcaatctcctgcggagccagactcctcctcgggaaccggaaaggcgggcaaccagcctgcaagaaagagattgaattttggtcagactggagacgcagactccgtacctgacccccagcctctcggacagccaccagcagccccctctggtctgggatctactacaatggctacaggcagtggcgcaccaatggcagacaataacgagggtgccgatggagtgggtaattcctcaggaaattggcattgcgattcccaatggttgggcgacagagtcatcaccaccagcacccgaacctgggccctgcccacctacaacaatcacctctacaagcaaatctccagccaatcaggagccagcaacgacaaccactactttggctacagcaccccctgggggtattttgacttcaacagattccactgccacttttcaccacgtgactggcaaagactcatcaacaacaactggggattccgacccaaaagactcaacttcaagctctttaacattcaagtcaaagaggtcacgcagaatgacggtacgacgacgattgccaataaccttaccagcacggttcaggtgtttactgactcggagtaccagctcccgtacgtcctcggctcggcgcatcaaggatgcctcccgccgtttccagcggacgtcttcatggtcccacagtatggatacctcaccctgaacaacgggagtcaggcggtaggacgctcttccttttactgcctggagtactttccttctcagatgcttcgtaccggaaacaactttaccttcagttacacctttgaagacgttcctttccacagcagctacgctcacagtcaaagtctggaccggctgatgaatcctctgatagaccagtacctgtattatctaaacaaaacacaatcaaatagtggaactcttcagcagtctcggctactgtttagtcaagctggacccaccagcatgtctcttcaagctaaaaactggctgcctggaccttgctacagacaacagcgtctgtcaaagcaggcaaacgacaacaacaacagcaactttccctggactgcggctacaaagtatcatctaaatggccgggactcgttggttaatccaggaccagctatggccagccacaaagacgatgaagaaaagtttttccccatgcatggaaccctgatatttggtaaacaaggaacaaatgctaacgacgcggatttggacaatgtcatgattacagatgaagaagaaatccgcaccaccaatcccgtggctacggagcagtacgggactgtgtcaaataatttgcaaaactcaaatactggtccaactactggaactgtcaatcaccaaggagcgttacctggtatggtgtggcaggatcgagacgtgtaccttcagggacccatttgggccaagattcctcacaccgatggacactttcatccttctccactgatgggaggttttggactcaaacacccgcctcctcagatcatgatcaaaaacactcccgttccagccaatcctcctacaaacttcagttctgccaagtttgcttctttcatcacacagtattccacggggcaggtcagcgtggagatagagtgggagctgcagaaggagaacagcaaacgctggaaccccgagatccagtatacttccaactacaacaagtctgttaatgtggactttactgtggacactaatggtgtgtattcagagcctcgccccattggcaccagatacctgactcgtaatctgtaa

SEQ ID NO: 12356 - DNA, 2208 bp, Artificial Sequence
  source: /note="Description of Artificial Sequence: Synthetic polynucleotide"
atggctgccgatggttatcttccagattggctcgaggacactctctctgaaggaataagacagtggtggaagctcaaacctggcccaccaccgccaaagcccgcagagcggcataaggacgacagcaggggtcttgtgcttcctgggtacaagtacctcggacccttcaacggactcgacaagggagagccggtcaacgaggcagacgccgcggccctcgagcacgacaaggcctacgaccggcagctcgacagcggagacaacccgtacctcaagtacaaccacgccgacgcggagtttcaggagcgccttaaagaagatacgtcttttgggggcaacctcggacgagcagtattccaggcgaaaaagagggttcttgaacctctgggcctggttgaggagcctgttaagacggctccgggaaaaaagaggccggtagagcactctcctgtggagccagactcctcctcgggaaccggaaaagcgggccagcagcctgcgagaaagagattgaattttggtcagactggagacgcagactccgtacctgacccccagcctctcggacagccaccagcagcccccacaagtttgggatctactacaatggctacaggcagtggcgcaccaatggcagacaataacgagggtgccgatggagtgggtaattcctcaggaaattggcattgcgattcccaatggtcgggcgacagagtcatcaccaccagcacccgaacctgggccctgcccacctacaacaaccacctctacaagcaaatctccagccaatcaggagccagcaacgacaaccactactttggctacagcaccccctgggggtattttgacttcaacagattccactgccacttttcaccacgtgactggcaaagactcatcaacaacaactggggattccgacccaagagactcaacttcaagctctttaacattcaagtcaaagaggtcacgcagaatgacggtacgacgacgattgccaataaccttaccagcacggttcaggtgtctactgactcggagtaccagctcccgtacgtcctcggctcggcgcatcaaggatgcctcccgccgtttccagcggacgtcttcatggtcccacagtatggatacctcaccctgaacaacgggagtcaggcggtaggacgctcttccttttactgcctggagtactttccttctcagatgcttcgtaccggaaacaactttaccttcagttacacctttgaagacgttcctttccacagcagctacgctcacagtcaaagtctggaccggctgatgaatcctcttatcgaccagtacctgtattatctaaacaaaacacaatcaaatagtggaactcttcagcagtctcggctactgtttagtcaagctggacctaccagcatgtctcttcaagctaaaaactggctgcctggaccttgctacagacaacagcgtctgtcaaagcaggcaaacgacaacaacaacagcaactttccctggactgcggctacaaagtatcatctaaatggccgggactcgttggttaatccaggaccagctatggccagccacaaagacgatgaagaaaagtttttccccatgcatggaaccctgatatttggcaaacaaggaacaaatgctaacgacgcggatttggacaatgtcatgattacagatgaagaagaaatccgtaccaccaatcccgtggctacggagcagtacgggactgtgtcaaataatttgcaaaactcaaatactggtccaactactggaactgtcaatcaccaaggagcgttacctggtatggtgtggcaggatcgagacgtgtaccttcagggacccatttgggccaagattcctcacaccgatggacactttcacccttctccgctgatgggaggttttggactcaaacacccgcctcctcagatcatgatcaaaaacactcccgttccagccaatcctcccacaaacttcagttctgccaagtttgcttctttcatcacacagtattccacgggacaggttagcgtggagatcgagtgggagctgcagaaggagaacagcaaacgctggaaccccgagatccagtacacttccaactacaacaagtctgttaatgtggactttactgtggacactaatggtgtgtattcagagcctcgccccattggcaccagatacctgactcgtaatctgtaa

SEQ ID NO: 12357 - DNA, 2208 bp, Artificial Sequence
  source: /note="Description of Artificial Sequence: Synthetic polynucleotide"
atggctgccgatggttatcttccagattggctcgaggacattctctctgaaggaataagacagtggtggaagctcaaacctggcccaccaccaccaaagcccgcagagcggcataaggacgacagcaggggtcttgtgcttcctgggtacaagtacctcggacccttcaacggactcgacaaaggagagccggtcaacgaggcagacgccgcggccctcgagcacgacaaggcctacgaccggcagctcgacagcggagacaacccgtacctcaagtacaaccacgccgacgcggagtttcaggagcgtcttaaagaagatacgtcttttgggggcaacctcggacgagcagtcttccaggcaaaaaagagggttcttgaacctctgggcctggttgaggaacctgttaagacggctccgggaaaaaagaggccggtagagcaatctcctgcggagccagactcctcctcgggaaccggaaaggcgggcaaccagcctgcaagaaagagattgaattttggtcagactggagacgcagactccgtacctgacccccagcctctcggacagccaccagcagccccctctggtctgggatctactacaatggctacaggcagtggcgcaccaatggcagacaataacgagggtgccgatggagtgggtaattcctcaggaaattggcattgcgattcccaatggttgggcgacagagtcatcaccaccagcacccgaacctgggccctgcccacctacaacaatcacctctacaagcaaatctccagccaatcaggagccagcaacgacaaccactactttggctacagcaccccctgggggtattttgacttcaacagattccactgccacttttcaccacgtgactggcaaagactcatcaacaacaactggggattccgacccaaaagactcaacttcaagctctttaacattcaagtcaaagaggtcacgcagaatgacggtacgacgacgattgccaataaccttaccagcacggttcaggtgtttactgactcggagtaccagctcccgtacgtcctcggctcggcgcatcaaggatgcctcccgccgtttccagcggacgtcttcatggtcccacagtatggatacctcaccctgaacaacgggagtcaggcggtaggacgctcttccttttactgcctggagtactttccttctcagatgcttcgtaccggaaacaactttaccttcagttacacctttgaagacgttcctttccacagcagctacgctcacagtcaaagtctggaccggctgatgaatcctctgatagaccagtacctgtattatctaaacaaaacacaatcaaatagtggaactcttcagcagtctcggctactgtttagtcaagctggacccaccagcatgtctcttcaagctaaaaactggctgcctggaccttgctacagacaacagcgtctgtcaaagcaggcaaacgacaacaacaacagcaactttccctggactgcggctacaaagtatcatctaaatggccgggactcgttggttaatccaggaccagctatggccagccacaaagacgatgaagaaaagtttttccccatgcatggaaccctgatatttggtaaacaaggaacaaatgctaacgacgcggatttggacaatgtcatgattacagatgaagaagaaatccgcaccaccaatcccgtggctacggagcagtacgggactgtgtcaaataatttgcaaaactcaaatactggtccaactactggaactgtcaatcaccaaggagcgttacctggtatggtgtggcaggatcgagacgtgtaccttcagggacccatttgggccaagattcctcacaccgatggacactttcatccttctccactgatgggaggttttggactcaaacacccgcctcctcagatcatgatcaaaaacactcccgttccagtcaatcctcctacaaacttcagttctgccaagtttgcttctttcatcacacagtattccacggggcaggtcagcgtggagatagagtgggagctgcagaaggagaacagcaaacgctggaaccccgagatccagtatacttccaactacaacaagtctgttaatgtggactttactgtggacactaatggtgtgtattcagagcctcgccccattggcaccagatacctgactcgtaatctgtaa

SEQ ID NO: 12358 - DNA, 2208 bp, Artificial Sequence
  source: /note="Description of Artificial Sequence: Synthetic polynucleotide"
atggctgccgatggttatcttccagattggctcgaggacactctctctgaaggaataagacagtggtggaagctcaaacctggcccaccaccgccaaagcccgcagagcggcataaggacgacagcaggggtcttgtgcttcctgggtacaagtacctcggacccttcaacggactcgacaaaggagagccggtcaacgaggcagacgccgcggccctcgagcacgacaaggcctacgaccggcagctcgacagcggagacaacccgtacctcaagtacaaccacgccgacgcggagtttcaggagcgccttaaagaagatacgtcttttgggggcaacctcgcaagagcagtattccaggcgaaaaagagggttcttgaacctctgggcctggttgaggagcctgttaagacggctccgggaaaaaagaggccggtagagcactctcctgcggagccagattcctcctccggaactggaaagtcgggccaacagcctgcaagaaagagattgaattttggtcagactggagacgcagactccgtacctgacccccagcctctcggacagccaccagcagccccctctggtctgggatctactacaatggctacaggcagtggcgcaccaatggcagacaataacgagggtgccgatggagtgggtaattcctcaggaaattggcattgcgattcccaatggttgggcgacagagtcatcaccaccagcacccgaacctgggccctgcccacctacaacaatcacctctacaagcaaatctccagccaatcaggagccagcaacgacaaccactactttggctacagcaccccctgggggtattttgacttcaacagattccactgccacttttcaccacgtgactggcaaagactcatcaacaacaactggggattccgacccaaaagactcaacttcaagctctttaacattcaagtcaaagaggtcacgcagaatgacggtacgacgacgattgccaataaccttaccagcacggttcaggtgtttactgactcggagtaccagctcccgtacgtcctcggctcggcgcatcaaggatgcctcccgccgtttccagcggacgtcttcatggtcccacagtatggatacctcaccctgaacaacgggagtcaggcggtaggacgctcttccttttactgcctggagtactttccttctcagatgcttcgtaccggaaacaactttaccttcagttacacctttgaagacgttcctttccacagcagctacgctcacagtcaaagtctggaccggctgatgaatcctctgatagaccagtacctgtattatctaaacaaaacacaatcaaatagtggaactcttcagcagtctcggctactgtttagtcaagctggacccaccagcatgtctcttcaagctaaaaactggctgcctggaccttgctacagacaacagcgtctgtcaaagcaggcaaacgacaacaacaacagcaactttccctggactgcggctacaaagtatcatctaaatggccgggactcgttggttaatccaggaccagctatggccagccacaaagacgatgaagaaaagtttttccccatgcatggaaccctgatatttggtaaacaaggaacaaatgctaacgacgcggatttggacaatgtcatgattacagatgaagaagaaatccgcaccaccaatcccgtggctacggagcagtacgggactgtgtcaaataatttgcaaaactcaaatactggtccaactactggaactgtcaatcaccaaggagcgttacctggtatggtgtggcaggatcgagacgtgtaccttcagggacccatttgggccaagattcctcacaccgatggacactttcatccttctccactgatgggaggttttggactcaaacacccgcctcctcagatcatgatcaaaaacactcccgttccagccaatcctcctacaaacttcagttctgccaagtttgcttctttcatcacacagtattccacggggcaggtcagcgtggagatagagtgggagctgcagaaggagaacagcaaacgctggaaccccgagatccagtatacttccaactacaacaagtctgttaatgtggactttactgtggacactaatggtgtgtattcagagcctcgccccattggcaccagatacctgactcgtaatctgtaa

SEQ ID NO: 12359 - DNA, 2208 bp, Artificial Sequence
  source: /note="Description of Artificial Sequence: Synthetic polynucleotide"
atggctgccgatggttatcttccagattggctcgaggacattctctctgaaggaataagacagtggtggaagctcaaacctggcccaccaccaccaaagcccgcagagcggcataaggacgacagcaggggtcttgtgcttcctgggtacaagtacctcggacccttcaacggactcgacaaaggagagccggtcaacgaggcagacgccgcggccctcgagcacgacaaggcctacgaccggcagctcgacagcggagacaacccgtacctcaagtacaaccacgccgacgcggagtttcaggagcgtcttaaagaagatacgtcttttgggggcaacctcggacgagcagtcttccaggcaaaaaagagggttcttgaacctctgggcctggttgaggaacctgttaagacggctccgggaaaaaagaggccggtagagcaatctcctgcggagccagactcctcctcgggaaccggaaaggcgggcaaccagcctgcaagaaagagattgaattttggtcagactggagacgcagactccgtacctgacccccagcctctcggacagccaccagcagccccctctggtctgggatctactacaatggctacaggcagtggcgcaccaatggcagacaataacgagggtgccgatggagtgggtaattcctcaggaaattggcattgcgattcccaatggttgggcgacagagtcatcaccaccagcacccgaacctgggccctgcccacctacaacaatcacctctacaagcaaatctccagccaatcaggagccagcaacgacaaccactactttggctacagcaccccctgggggtattttgacttcaacagattccactgccacttttcaccacgtgactggcaaagactcatcaacaacaactggggattccgacccaaaagactcaacttcaagctctttaacattcaagtcaaagaggtcacgcagaatgacggtacgacgacgattgccaataaccttaccagcacggttcaggtgtttactgactcggagtaccagctcccgtacgtcctcggctcggcgcatcaaggatgcctcccgccgtttccagcggacgtcttcatggtcccacagtatggatacctcaccctgaacaacgggagtcaggcggtaggacgctcttccttttactgcctggagtactttccttctcagatgcttcgtaccggaaacaactttaccttcagttacacctttgaagacgttcctttccacagcagctacgctcacagtcaaagtctggaccggctgatgaatcctctgatagaccagtacctgtattatctaaacaaaacacaatcaaatagtggaactcttcagcagtctcggctactgtttagtcaagctggacccaccagcatgtctcttcaagctaaaaactggctgcctggaccttgctacagacaacagcgtctgtcaaagcaggcaaacgacaacaacaacagcaactttccctggactgcggctacaaagtatcatctaaatggccgggactcgttggttaatccaggaccagctatggccagccacaaagacgatgaagaaaagtttttccccatgcatggaaccctgatatttggtaaacaaggaacaaatgctaacgacgcggatttggacaatgtcatgattacagatgaagaagaaatccgcaccaccaatcccgtggctacggagcagtacgggactgtgtcaaataatttgcaaaactcaaatactggtccaactactggaactgtcaatcaccaaggagcgttacctggtatggtgtggcaggatcgagacgtgtaccttcagggacccatttgggccaagattcctcacaccgatggacactttcatccttccccactgatgggaggttttggactcaaacacccgcctcctcagatcatgatcaaaaacactcccgttccagccaatcctcctacaaacttcagttctgccaagtttgcttctttcatcacacagtattccacggggcaggtcagcgtggggatagagtgggagctgcagaaggagaacagcaaacgctggaaccccgagatccagtatacttccaactacaacaagtctgttaatgtggactttactgtggacactaatggtgtgtattcagagcctcgccccattggcaccagatacctgactcgtaatctgtaa

SEQ ID NO: 12360 - DNA, 2205 bp, Artificial Sequence
  source: /note="Description of Artificial Sequence: Synthetic polynucleotide"
atggctgccgatggttatcttccagattggctcgaggacattctctctgaaggaataagacagtggtggaagctcaaacctggcccaccaccaccaaagcccgcagagcggcataaggacgacagcaggggtcttgtgcttcctgggtacaagtacctcggacccttcaacggactcgacaaaggagagccggtcaacgaggcagacgccgcggccctcgagcacgacaaggcctacgaccggcagctcgacagcggagacaacccgtacctcaagtacaaccacgccgacgcggagtttcaggagcgtcttaaagaagatacgtcttttgggggcaacctcggacgagcagtcttccaggcaaaaaagagggttcttgaacctctgggcctggttgaggaacctgttaagacggctccgggaaaaaagaggccggtagagcaatctcctgcggagccagactcctcctcgggaaccggaaaggcgggcaaccagcctgcaagaaagagattgaattttggtcagactggagacgcagactccgtacctgacccccagcctctcggacagccaccagcagccccctctggtctgggatctactacaatggctacaggcagtggcgcaccaatggcagacaataacgagggtgccgatggagtgggtaattcctcaggaaattggcattgcgattcccaatggttgggcgacagagtcatcaccaccagcacccgaacctgggccctgcccacctacaacaatcacctctacaagcaaatctccagccaatcaggagccagcaacgacaaccactactttggctacagcaccccctgggggtattttgacttcaacagattccactgccacttttcaccacgtgactggcaaagactcatcaacaacaactggggattccgacccaaaagactcaacttcaagctctttaacattcaagtcaaagaggtcacgcagaatgacggtacgacgacgattgccaataaccttaccagcacggttcaggtgtttactgactcggagtaccagctcccgtacgtcctcggctcggcgcatcaaggatgcctcccgccgtttccagcggacgtcttcatggtcccacagtatggatacctcaccctgaacaacgggagtcaggcggtaggacgctcttccttttactgcctggagtactttccttctcagatgcttcgtaccggaaacaactttaccttcagttacacctttgaagacgttcctttccacagcagctacgctcacagtcaaagtctggaccggctgatgaatcctctgatagaccagtacctgtattatctaaacaaaacacaatcaaatagtggaactcttcagcagtctcggctactgtttagtcaagctggacccaccagcatgtctcttcaagctaaaaactggctgcctggaccttgctacagacaacagcgtctgtcaaagcaggcaaacgacaacaacagcaactttccctggactgcggctacaaagtatcatctaaatggccgggactcgttggttaatccaggaccagctatggccagccacaaagacgatgaagaaaagtttttccccatgcatggaaccctgatatttggtaaacaaggaacaaatgctaacgacgcggatttggacaatgtcatgattacagatgaagaagaaatccgcaccaccaatcccgtggctacggagcagtacgggactgtgtcaaataatttgcaaaactcaaatactggtccaactactggaactgtcaatcaccaaggagcgttacctggtatggtgtggcaggatcgagacgtgtaccttcagggacccatttgggccaagattcctcacaccgatggacactttcatccttctccactgatgggaggttttggactcaaacacccgcctcctcagatcatgatcaaaaacactcccgttccagccaatcctcctacaaacttcagttctgccaagtttgcttctttcatcacacagtattccacggggcaggtcagcgtggagatagagtgggagctgcagaaggagaacagcaaacgctggaaccccgagatccagtatacttccaactacaacaagtctgttaatgtggactttactgtggacactaatggtgtgtattcagagcctcgccccattggcaccagatacctgactcgtaatctgtaa

SEQ ID NO: 12361 - DNA, 2208 bp, Artificial Sequence
  source: /note="Description of Artificial Sequence: Synthetic polynucleotide"
atggctgccgatggttatcttccagattggctcgaggacactctctctgaaggaataagacagtggtggaagctcaaacctggcccaccaccgccaaagcccgcagagcggcataaggacgacagcaggggtcttgtgcttcctgggtataagtacctcggacccttcaacggactcgacaagggagagccggtcaacgaggcagacgccgcggccctcgagcacgacaaggcctacgaccggcagctcgacagcggagacaacccgtacctcaagtacaaccacgccgacgcggagtttcaggagcgccttaaagaagatacgtcttttgggggcaacctcggacgagcagtattccaggcgaaaaagagggttcttgaacctctgggcctggttgtggagcctgttaagacggctccgggaaaaaagaggccggtagagcactctcctgtggagccagactcctcctcgggaaccggaaaagcgggccagcagcctgcgagaaagagattgaattttgatcagactggaggcgcagactccgtacctgacccccagcctctcggacagccaccagcagcccccacaagtttgggatctactacaatggctacaggcagtggcgcaccaatggcagacaataacgagggtgccgatggagtgggtaattcctcaggaaattggcattgcgattcccaatggtcgggcgacagagtcatcaccaccagcacccgaacctgggccctgcccacctacaacaaccacctctacaagcaaatctccagccgatcaggagccagcaacgacaaccactactttggctacagcaccccctgggggtattttgacttcaacggattccactgccacttttcaccacgtgactggcaaagactcatcaacaacaactggggattccgacccaagagactcaacttcaagctctttaacattcaagtcaaagaggtcacgcagaatgacggtacgacgacgattgccaataaccttaccagcacggttcaggtgtttactgactcggagtaccagctcccgcacgtcctcggctcggcgcatcaaggatgcctcccgccgtttccagcggacgtcttcatggtcccacagtatggatacctcaccctgaacaacgggagtcaggcggtaggacgctcttccttttactgcccggggtactttccttctcagatgcttcgtaccggaaacaactttaccttcagttacacctttgaagacgttcctttccacagcagctacgctcacagtcaaagtctggaccggctgatgaatcctcttatcgaccagtacctgtattatctaaacaaaacacaatcaaatagtggaactcttcagcagtctcggctactgtttagtcaagctggacctaccagcatgtctcttcaagctaaaaactggctgcctggaccttgctacagacaacagcgtctgtcaaagcaggcaaacggcaacaacaacagcaactttccctggactgcggctacaaagtatcatctaaatggccgggactcgttggttaatccaggaccagctatggccagccacaaagacgatgaagaaaagtttttccccatgcatggaaccctgatatttggcaaacaaggaacaaatgctaacgacgcggatttggacaatgtcatgattacagatgaagaagaaatccgtaccaccaatcccgtggctacggagcagtacgggactgtgtcaaataatttgcaaaactcaaatactggtccaactactggaactgtcaatcaccaaggagcgttacctggtatggtgtggcaggatcgagacgtgtaccttcagggacccatttgggccaagattcctcacaccgatggacactttcacccttctccgctgatgggaggttttggactcaaacacccgcctcctcagatcatgatcaaaaacactcccgttccagccaatcctcccacaaacttcagttctgccaagtttgcttctttcatcacacagtattccacgggacaggttagcgtggagatcgagtgggagctgcagaaggagaacagcaaacgctggaaccccgagatccagtacacttccaactacaacaagtctgttaatgtggactttactgtggacactaatggtgtgtattcagagcctcgccccattggcaccagatacctgactcgtaatctgtaa

SEQ ID NO: 12362 - DNA, 2205 bp, Artificial Sequence
  source: /note="Description of Artificial Sequence: Synthetic polynucleotide"
atggctgccgatggttatcttccagattggctcgaggacactctctctgaaggaataagacagtggtggaagctcaaacctggcccaccaccgccaaagcccgcagagcggcataaggacgacagcaggggtcttgtgcttcctgggtacaagtacctcggacccttcaacggactcgacaagggagagccggtcaacgaggcagacgccgcggccctcgagcacgacaaggcctacgaccggcagctcgacagcggagacaacccgtacctcaagtacaaccacgccgacgcggagtttcaggagcgccttaaagaagatacgtcttttgggggcaacctcggacgagcagtattccaggcgaaaaagagggttcttgaacctctgggcctggttgaggagcctgttaagacggctccgggaaaaaagaggccggtagagcactctcctgtggagccagactcctcctcgggaaccggaaaagcgggccagcagcctgcgagaaagagattgaattttggtcagactggagacgcagactccgtacctgacccccagcctctcggacagccaccagcagcccccacaagtttgggatctactacaatggctacaggcagtggcgcaccaatggcagacaataacgagggtgccgatggagtgggtaattcctcaggaaattggcattgcgattcccaatggtcgggcgacagagtcatcaccaccagcacccgaacctgggccctgcccacctacaacaaccacctctacaagcaaatctccagccaatcaggagccagcaacgacaaccactactttggctacagcaccccctgggggtattttgacttcaacagattccactgccacttttcaccacgtgactggcaaagactcatcaacaacaactggggattccgacccaagagactcaacttcaagctctttaacattcaagtcaaagaggtcacgcagaatgacggtacgacgacgattgccaataaccttaccagcacggttcaggtgtttactgactcggagtaccagctcccgtacgtcctcggctcggcgcatcaaggatgcctcccgccgtttccagcggacgtcttcatggtcccacagtatggatacctcaccctgaacaacgggagtcaggcggtaggacgctcttccttttactgcctggagtactttccttctcagatgcttcgtaccggaaacaactttaccttcagttacacctttgaagacgttcctttccacagcagctacgctcacagtcaaagtctggaccggctgatgaatcctcttatcgaccagtacctgtattatctaaacaaaacacaatcaaatagtggaactcttcagcagtctcggctactgtttagtcaagctggacctaccagcatgtctcttcaagctaaaaactggctgcctggaccttgctacagacaacagcgtctgtcaaagcaggcaaacgacaacaacagcaactttccctggactgcggctacaaagtatcatctaaatggccgggactcgttggttaatccaggaccagctatggccagccacaaagacgatgaagaaaagtttttccccatgcatggaaccctgatatttggcaaacaaggaacaaatgctaacgacgcggatttggacaatgtcatgattacagatgaagaagaaatccgtaccaccaatcccgtggctacggagcagtacgggactgtgtcaaataatttgcaaaactcaaatactggtccaactactggaactgtcaatcaccaaggagcgttacctggtatggtgtggcaggatcgagacgtgtaccttcagggacccatttgggccaagattcctcacaccgatggacactttcacccttctccgctgatgggaggttttggactcaaacacccgcctcctcagatcatgatcaaaaacactcccgttccagccaatcctcccacaaacttcagttctgccaagtttgcttctttcatcacacagtattccacgggacaggttagcgtggagatcgagtgggagctgcagaaggagaacagcaaacgctggaaccccgagatccagtacacttccaactacaacaagtctgttaatgtggactttactgtggacactaatggtgtgtattcagagcctcgccccattggcaccagatacctgactcgtaatctgtaa

SEQ ID NO: 12363 - DNA, 2208 bp, Artificial Sequence
  source: /note="Description of Artificial Sequence: Synthetic polynucleotide"
atggctgccgatggttatcttccagattggctcgaggacattctctctgaaggaataagacagtggtggaagctcaaacctggcccaccaccaccaaagcccgcagagcggcataaggacgacagcaggggtcttgtgcttcctgggtacaagtacctcggacccttcaacggactcgacaaaggagagccggtcaacgaggcagacgccgcggccctcgagcacgacaaggcctacgaccggcagctcgacagcggagacaacccgtacctcaagtacaaccacgccgacgcggagtttcaggagcgtcttaaagaagatacgtcttttgggggcaacctcggacgagcagtcttccaggcaaaaaagagggttcttgaacctctgggcctggttgaggaacctgttaagacggctccgggaaaaaagaggccggtagagcaatctcctgcggagccagactcctcctcgggaaccggaaaggcgggcaaccagcctgcaagaaagagattgaattttggtcagactggagacgcagactccgtacctgacccccagcctctcggacagccaccagcagccccctctggtctgggatctactacaatggctacaggcagtggcgcaccaatggcagacaataacgagggtgccgatggagtgggtaattcctcaggaaattggcattgcgattcccaatggttgggcgacagagtcatcaccaccagcacccgaacctgggccctgcccacctacaacaatcacctctacaagcaaatctccagccaatcaggagccagcaacgacaaccactactttggctacagcaccccctgggggtattttgacttcaacagattccactgccacttttcaccacgtgactggcaaagactcatcaacaacaactggggattccgacccaaaagactcaacttcaagctctttaacattcaagtcaaagaggtcacgcagaatgacggtacgacgacgattgccaataaccttaccagcacggttcaggtgtttactgactcggagtaccagctcccgtacgtcctcggctcggcgcatcaaggatgcctcccgccgtttccagcggacgtcttcatggtcccacagtatggatacctcaccctgaacaacgggagtcaggcggtaggacgctcttccttttactgcctggagtactttccttctcagatgcttcgtaccggaaacaactttaccttcagttacacctttgaagacgttcctttccacagcagctacgctcacagtcaaagtctggaccggctgatgaatcctctgatagaccagtacctgtattatctaaacaaaacacaatcaaatagtggaactcttcagcagtctcggctactgtttagtcaagctggacccaccagcatgtctcttcaagctaaaaactggctgcctggaccttgctacagacaacagcgtctgtcaaagcaggcaaacgacaacaacaacagcaactttccctggactgcggctacaaagtatcatctaaatggccgggactcgttggttaatccaggaccagctatggccagccacaaagacgatgaagaaaagtttttccccatgcatggaaccctgatatttggtaaacaaggaacaaatgctaacgacgcggatttggacaatgtcatgattacagatgaagaagaaatccgcaccaccaatcccgtggctacggagcagtacgggactgtgtcaaataatttgcaaaactcaaatactggtccaactactggaactgtcaatcaccaaggagcgttacctggtatggtgtggcaggatcgagacgtgtaccttcagggacccatttgggccaagattcctcacaccgatggacactttcatccttccccactgatgggaggttttggactcaaacacccgcctcctcagatcatgatcaaaaacactcccgttccagccaatcctcctacaaacttcagttctgccaagtttgcttctttcatcacacagtattccacggggcaggtcagcgtggggatagagtgggtgctgcagaaggagaacagcaaacgctggaaccccgagatccagtatacttccaactacaacaagtctgttaatgtggactttactgtggacactaatggtgtgtattcagagcctcgccccattggcaccagatacctgactcgtaatctgtaa

SEQ ID NO: 12364 - DNA, 2208 bp, Artificial Sequence
  source: /note="Description of Artificial Sequence: Synthetic polynucleotide"
atggctgccgatggttatcttccagattggctcgaggacactctctctgaaggaataagacagtggtggaagctcaaacctggcccaccaccgccaaagcccgcagagcggcataaggacgacagcaggggtcttgtgcttcctgggtacaagtacctcggacccttcaacggactcgacaaaggagagccggtcaacgaggcagacgccgcggccctcgagcacgacaaggcctacgaccggcagctcgacagcggagacaacccgtacctcaagtacaaccacgccgacgcggagtttcaggagcgccttaaagaagatacgtcttttgggggcaacctcgcaagagcagtattccaggcgaaaaagagggttcttgaacctctgggcctggttgaggagcctgttaagacggctccgggaaaaaagaggccggtagagcaatctcctgcggagccagactcctcctcgggaaccggaaaggcgggcaaccagcctgcaagaaagagattgaattttggtcagactggagacgcagactccgtacctgacccccagcctctcggacagccaccagcagccccctctggtctgggatctactacaatggctacaggcagtggcgcaccaatggcagacaataacgagggtgccgatggagtgggtaattcctcaggaaattggcattgcgattcccaatggttgggcgacagagtcatcaccaccagcacccgaacctgggccctgcccacctacaacaatcacctctacaagcaaatctccagccaatcaggagccagcaacgacaaccactactttggctacagcaccccctgggggtattttgacttcaacagattccactgccacttttcaccacgtgactggcaaagactcatcaacaacaactggggattccgacccaaaagactcaacttcaagctctttaacattcaagtcaaagaggtcacgcagaatgacggtacgacgacgattgccaataaccttaccagcacggttcaggtgtttactgactcggagtaccagctcccgtacgtcctcggctcggcgcatcaaggatgcctcccgccgtttccagcggacgtcttcatggtcccacagtatggatacctcaccctgaacaacgggagtcaggcggtaggacgctcttccttttactgcctggagtactttccttctcagatgcttcgtaccggaaacaactttaccttcagttacacctttgaagacgttcctttccacagcagctacgctcacagtcaaagtctggaccggctgatgaatcctctgatagaccagtacctgtattatctaaacaaaacacaatcaaatagtggaactcttcagcagtctcggctactgtttagtcaagctggacccaccagcatgtctcttcaagctaaaaactggctgcctggaccttgctacagacaacagcgtctgtcaaagcaggcaaacgacaacaacaacagcaactttccctggactgcggctacaaagtatcatctaaatggccgggactcgttggttaatccaggaccagctatggccagccacaaagacgatgaagaaaagtttttccccatgcatggaaccctgatatttggtaaacaaggaacaaatgctaacgacgcggatttggacaatgtcatgattacagatgaagaagaaatccgcaccaccaatcccgtggctacggagcagtacgggactgtgtcaaataatttgcaaaactcaaatactggtccaactactggaactgtcaatcaccaaggagcgttacctggtatggtgtggcaggatcgagacgtgtaccttcagggacccatttgggccaagattcctcacaccgatggacactttcatccttctccactgatgggaggttttggactcaaacacccgcctcctcagatcatgatcaaaaacactcccgttccagccaatcctcctacaaacttcagttctgccaagtttgcttctttcatcacacagtattccacggggcaggtcagcgtggagatagagtgggagctgcagaaggagaacagcaaacgctggaaccccgagatccagtatacttccaactacaacaagtctgttaatgtggactttactgtggacactaatggtgtgtattcagagcctcgccccattggcaccagatacctgactcgtaatctgtaa

SEQ ID NO: 12365 - DNA, 2208 bp, Artificial Sequence
  source: /note="Description of Artificial Sequence: Synthetic polynucleotide"
atggctgccgatggttatcttccagattggctcgaggacattctctctgaaggaataagacagtggtggaagctcaaacctggcccaccaccaccaaagcccgcagagcggcataaggacgacagcaggggtcttgtgcttcctgggtacaagtacctcggacccttcaacggactcgacaaaggagagccggtcaacgaggcagacgccgcggccctcgagcacgacaaggcctacgaccggcagctcgacagcggagacaacccgtacctcaagtacaaccacgccgacgcggagtttcaggagcgtcttaaagaagatacgtcttttgggggcaacctcggacgagcagtcttccaggcaaaaaagagggttcttgaacctctgggcctggttgaggaacctgttaagacggctccgggaaaaaagaggccggtagagcaatctcctgcggagccagactcctcctcgggagccggaaaggcgggcaaccagcctgcaagaaagagattgaattttggtcagactggagacgcagactccgtacctgacccccagcctctcggacagccaccagcagccccctctggtctgggatctactacaatggctacaggcagtggcgcaccaatggcagacaataacgagggtgccgatggagtgggtaattcctcaggaaattggcattgcgattcccaatggttgggcgacagagtcatcaccaccagcacccgaacctgggccctgcccacctacaacaatcacctctacaagcaaatctccagccaatcaggagccagcaacgacaaccactactttggctacagcaccccctgggggtattttgacttcaacagattccactgccacttttcaccacgtgactggcaaagactcatcaacaacaactggggattccgacccaaaagactcaacttcaagctctttaacattcaagtcaaagaggtcacgcagaatgacggtacgacgacgattgccaataaccttaccagcacggttcaggtgtttactgactcggagtaccagctcccgtacgtcctcggctcggcgcatcaaggatgcctcccgccgtttccagcggacgtcttcatggtcccacagtatggatacctcaccctgaacaacgggagtcaggcggtaggacgctcttccttttactgcctggagtactttccttctcagatgcttcgtaccggaaacaactttaccttcagttacacctttgaagacgttcctttccacagcagctacgctcacagtcaaagtctggaccggctgatgaatcctctgatagaccagtacctgtattatctaaacaaaacacaatcaaatagtggaactcttcagcagtctcggctactgtttagtcaagctggacccaccagcatgtctcttcaagctaaaaactggctgcctggaccttgctacagacaacagcgtctgtcaaagcaggcaaacgacaacaacaacagcaactttccctggactgcggctacaaagtatcatctaaatggccgggactcgttggttaatccaggaccagctatggccagccacaaagacgatgaagaaaagtttttccccatgcatggaaccctgatatttggtaaacaaggaacaaatgctaacgacgcggatttggacaatgtcatgattacagatgaagaagaaatccgcaccaccaatcccgtggctacggagcagtacgggactgtgtcaaataatttgcaaaactcaaatactggtccaactactggaactgtcaatcaccaaggagcgttacctggtatggtgtggcaggatcgagacgtgtaccttcagggacccatttgggccaagattcctcacaccgatggacactttcatccttctccactgatgggaggttttggactcaaacacccgcctcctcagatcatgatcaaaaacactcccgttccagccaatcctcctacaaacttcagttctgccaagtttgcttctttcatcacacagtattccacggggcaggtcagcgtggagatagagtgggagctgcagaaggagaacagcaaacgctggaaccccgagatccagtatacttccaactacaacaagtctgttaatgtggactttactgtggacactaatggtgtgtattcagagcctcgccccattggcaccagatacctgactcgtaatctgtaa

SEQ ID NO: 12366 - DNA, 2208 bp, Artificial Sequence
  source: /note="Description of Artificial Sequence: Synthetic polynucleotide"
atggctgccgatggttatcttccagattggctcaaggacattctctctgaaggaataagacagtggtggaagctcaaacctggcccaccaccaccaaagcccgcagagcggcataaggacgacagcaggggtcttgtgcttcctgggtacaagtacctcggacccttcaacggactcgacaaaggagagccggtcaacgaggcagacgccgcggccctcgagcacgacaaggcctacgaccggcagctcgacagcggagacaacccgtacctcaagtacaaccacgccgacgcggagtttcaggagcgtcttaaagaagatacgtcttttgggggcaacctcggacgagcagtcttccaggcaaaaaagagggttcttgaacctctgggcctggttgaggaacctgttaagacggctccgggaaaaaagaggccggtagagcaatctcctgcggagccagactcctcctcgggaaccggaaaggcgggcaaccagcctgcaagaaagagattgaattttggtcagactggagacgcagactccgtacctgacccccagcctctcggacagccaccagcagccccctctggtctgggatctactacaatggctacaggcagtggcgcaccaatggcagacaataacgagggtgccgatggagtgggtaattcctcaggaaattggcatcgcgattcccaatggttgggcgacagagtcatcaccaccagcacccgaacctgggccctgcccacctacaacaatcacctctacaagcaaatctccagccaatcaggagccagcaacgacaaccactactttggctacagcaccccctgggggtattttgacttcaacagattccactgccacttttcaccacgtgactggcaaagactcatcaacaacaactggggattccgacccaaaagactcaacttcaagctctttaacattcaagtcaaagaggtcacgcagaatgacggtacgacgacgattgccaataaccttaccagcacggttcaggtgtttactgactcggagtaccagctcccgtacgtcctcggctcggcgcatcaaggatgcctcccgccgtttccagcggacgtcttcatggtcccacagtatggatacctcaccctgaacaacgggagtcaggcggtaggacgctcttccttttactgcctggagtactttccttctcagatgcttcgtaccggaaacaactttaccttcagttacacctttgaagacgttcctttccacagcagctacgctcacagtcaaagtctggaccggctgatgaatcctctgatagaccagtacctgtattatctaaacaaaacacaatcaaatagtggaactcttcagcagtctcggctactgtttagtcaagctggacccaccagcatgtctcttcaagctaaaaactggctgcctggaccttgctacagacaacagcgtctgtcaaagcaggcaaacgacaacaacaacagcaactttccctggactgcggctacaaagtatcatctaaatggccgggactcgttggttaatccaggaccagctatggccagccacaaagacgatgaagaaaagtttttccccatgcatggaaccctgatatttggtaaacaaggaacaaatgctaacgacgcggatttggacaatgtcatgattacagatgaagaagaaatccgcaccaccaatcccgtggctacggagcagtacgggactgtgtcaaataatttgcaaaactcaaatactggtccaactactggaactgtcaatcaccaaggagcgttacctggtatggtgtggcaggatcgagacgtgtaccttcagggacccatttgggccaagattcctcacaccgatggacactttcatccttctccactgatgggaggttttggactcaaacacccgcctcctcagatcatgatcaaaaacactcccgttccagtcaatcctcctacaaacttcagttctgccaagtttgcttctttcatcacacagtattccacggggcaggtcagcgtggagatagagtgggagctgcagaaggagaacagcaaacgctggaaccccgagatccagtatacttccaactacaacaagtctgttaatgtggactttactgtggacactaatggtgtgtattcagagcctcgccccattggcaccagatacctgactcgtaatctgtaa

SEQ ID NO: 12367 - DNA, 2208 bp, Artificial Sequence
  source: /note="Description of Artificial Sequence: Synthetic polynucleotide"
atggctgccgatggttatcttccagattggctcgaggacattctctctgaaggaataagacggtggtggaagctcaaacctggcccaccaccaccaaagcccgcagagcggcataaggacgacagcaggggtcttgtgcttcctgggtacaagtacctcggacccttcaacggactcgacaaaggagagccggtcaacgaggcagacgccgcggccctcgagcacgacaaggcctacgaccggcagctcgacagcggagacaacccgtacctcaagtacaaccacgccgacgcagagtttcaggagcgtcttaaagaagatacgtcttttgggggcaacctcggacgagcagtcttccaggcaaaaaagagggttcttgaacctctgggcctggttgaggaacctgttaagacggctccgggaaaaaagaggccggtagagcaatctcctgcggagccagactcctcctcgggaaccggaaaggcgggcaaccagcctgcaagaaagagattgaattttggtcagactggagacgcagactccgtacctgacccccagcctctcggacagccaccagcagccccctctggtctgggatctactacaatggctacaggcagtggcgcaccaatggcagacaataacgagggtgccgatggagtgggtaattcctcaggaaattggcattgcgattcccaatggttgggcgacagagtcatcaccaccagcacccgaacctgggccctgcccacctacaacaatcacctctacaagcaaatctccagccaatcaggagccagcaacgacaaccactactttggctacagcaccccctgggggtattttgacttcaacagattccactgccacttttcaccacgtgactggcaaagactcatcaacaacaactggggattccgacccaaaagactcaacttcaagctctttaacattcaagtcaaagaggtcacgcagaatgacggtacgacgacgattgccaataaccttaccagcacggttcaggtgtttactgactcggagtaccagctcccgtacgtcctcggctcggcgcatcaaggatgcctcccgccgtttccagcggacgtcttcatggtcccacagtatggatacctcaccctgaacaacgggagtcaggcggtaggacgctcttccttttactgcctggagtactttccttctcagatgcttcgtaccggaaacaactttaccttcagttacacctttgaagacgttcctttccacagcagctacgctcacagtcaaagtctggaccggctgatgaatcctctgatagaccagtacctgtattatctaaacaaaacacaatcaaatagtggaactcttcagcagtctcggctactgtttagtcaagctggacccaccagcatgtctcttcaagctaaaaactggctgcctggaccttgctacagacaacagcgtctgtcaaagcaggcaaacgacaacaacaacagcaactttccctggactgcggctacaaagtatcatctaaatggccgggactcgttggttaatccaggaccagctatggccagccacaaagacgatgaagaaaagtttttccccatgcatggaaccctgatatttggtaaacaaggaacaaatgctaacgacgcggatttggacaatgtcatgattacagatgaagaagaaatccgcaccaccaatcccgtggctacggagcggtacgggactgtgtcaaataatttgcaaaactcaaatactggtccaactactggaactgtcaatcaccaaggagcgttacctggtatggtgtggcaggatcgagacgtgtaccttcagggacccatttgggccaagattcctcacaccgatggacactttcatccttctccactgatgggaggttttggactcaaacacccgcctcctcagatcatgatcaaaaacactcccgttccagccaatcctcctacaaacttcagttctgccaagtttgcttctttcatcacacagtattccacggggcaggtcagcgtggagatagagtgggagctgcagaaggagaacagcaaacgctggaaccccgagatccagtatacttccaactacaacaagtctgttaatgtggactttactgtggacactaatggtgtgtattcagagcctcgccccattggcaccagatacctgactcgtaatctgtaa

SEQ ID NO: 12368 - DNA, 2208 bp, Artificial Sequence
  source: /note="Description of Artificial Sequence: Synthetic polynucleotide"
atggctgccgatggttatcttccagattggctcgaggacactctctctgaaggaataagacagtggtggaagctcaaacctggcccaccaccgccaaagcccgcagagcggcataaggacgacagcaggggtcttgtgcttcctgggtacaagtacctcggacccttcaacggactcgacaaaggagagccggtcaacgaggcagacgccgcggccctcgagcacgacaaggcctacgaccggcagctcgacagcggagacaacccgtacctcaagtacaaccacgccgacgcggagtttcaggagcgccttaaagaagatacgtcttttgggggcaacctcgcaagagcagtattccaggcgaaaaagagggttcttgaacctctgggcctggttgaggagcctgttaagacggctccgggaaaaaagaggccggtagagcactctcctgcggagccagattcctcctccggaactggaaagtcgggccaacagcctgcaagaaagagattgaattttggtcagactggagacgcagactccgtacctgacccccagcctctcggacagccaccagcagccccctctggtctgggaactaatacgatggcttcaggcagtggcgcaccaatggcagacaataacgagggcgccgacggagtgggtaattcctcaggaaattggcattgcgattcccaatggttgggcgacagagtcatcaccaccagcacccgaacctgggccctgcccacctacaacaatcacctctacaagcaaatctccagccaatcaggagccagcaacgacaaccactactttggctacagcaccccctgggggtattttgacttcaacagattccactgccacttttcaccacgtgactggcaaagactcatcaacaacaactggggattccgacccaaaagactcaacttcaagctctttaacattcaagtcaaagaggtcacgcagaatgacggtacgacgacgattgccaataaccttaccagcacggttcaggtgtttactgactcggagtaccagctcccgtacgtcctcggctcggcgcatcaaggatgcctcccgccgtttccagcggacgtcttcatggtcccacagtatggatacctcaccctgaacaacgggagtcaggcggtaggacgctcttccttttactgcctggagtactttccttctcagatgcttcgtaccggaaacaactttaccttcagttacacctttgaagacgttcctttccacagcagctacgctcacagtcaaagtctggaccggctgatgaatcctctgatagaccagtacctgtattatctaaacaaaacacaatcaaatagtggaactcttcagcagtctcggctactgtttagtcaagctggacccaccagcatgtctcttcaagctaaaaactggctgcctggaccttgctacagacaacagcgtctgtcaaagcaggcaaacgacaacaacaacagcaactttccctggactgcggctacaaagtatcatctaaatggccgggactcgttggttaatccaggaccagctatggccagccacaaagacgatgaagaaaagtttttccccatgcatggaaccctgatatttggtaaacaaggaacaaatgctaacgacgcggatttggacaatgtcatgattacagatgaagaagaaatccgcaccaccaatcccgtggctacggagcagtacgggactgtgtcaaataatttgcaaaactcaaatactggtccaactactggaactgtcaatcaccaaggagcgttacctggtatggtgtggcaggatcgagacgtgtaccttcagggacccatttgggccaagattcctcacaccgatggacactttcatccttctccactgatgggaggttttggactcaaacacccgcctcctcagatcatgatcaaaaacactcccgttccagccaatcctcctacaaacttcagttctgccaagtttgcttctttcatcacacagtattccacggggcaggtcagcgtggagatagagtgggagctgcagaaggagaacagcaaacgctggaaccccgagatccagtatacttccaactacaacaagtctgttaatgtggactttactgtggacactaatggtgtgtattcagagcctcgccccattggcaccagatacctgactcgtaatctgtaa

SEQ ID NO: 12369 - DNA, 2208 bp, Artificial Sequence
  source: /note="Description of Artificial Sequence: Synthetic polynucleotide"
atggctgccgatggttatcttccagattggctcgaggacactctctctgaaggaataagacagtggtggaagctcaaacctggcccaccaccgccaaagcccgcagagcggcataaggacgacagcaggggtcttgtgcttcctgggtacaagtacctcggacccttcaacggactcgacaaaggagagccggtcaacgaggcagacgccgcggccctcgagcacgacaaggcctacgaccggcagctcgacagcggagacaacccgtacctcaagtacaaccacgccgacgcggagtttcaggagcgccttaaagaagatacgtcttttgggggcaacctcgcaagagcagtattccaggcgaaaaagagggttcttgaacctctgggcctggttgaggagcctgttaagacggctccgggaaaaaagaggccggtagagcactctcctgcggagccagattcctcctccggaactggaaagtcgggccaacagcctgcaagaaagagattgaattttggtcagactggagacgcagactccgtacctgacccccagcctctcggacagccaccagcagccccctctggtctgggaactaatacgatggcttcaggcagtggcgcaccaatggcagacaataacgagggcgccgacggagtgggtaattcctcgggaaattggcattgcgattccacatggatgggcgacagagtcatcaccaccagcacccgcacctgggctctgcccacctacaacaaccatctgtacaagcaaatttccagccagtctggagccagcaacgacaaccactacttcggctacagcacccccttggggtattttgacttcaacagattccactgccacttctccccacgtgactggcaaagactcatcaacaacaattggggattccggcccaaaagactcaacttcaagctctttaacattcaagtcaaagaggtcacgcagaatgacggtacgacgacgattgccaataaccttaccagcacggttcaggtgtttactgactcggagtaccagctcccgtacgtcctcggctcggcgcatcaaggatgcctcccgccgtttccagcggacgtcttcatggtcccacagtatggatacctcaccctgaacaacgggagtcaggcggtaggacgctcttccttttactgcctggagtactttccttctcagatgcttcgtaccggaaacaactttaccttcagttacacctttgaagacgttcctttccacagcagctacgctcacagtcaaagtctggaccggctgatgaatcctctgatagaccagtacctgtattatctaaacaaaacacaatcaaatagtggaactcttcagcagtctcggctactgtttagtcaagctggacccaccagcatgtctcttcaagctaaaaactggctgcctggaccttgctacagacaacagcgtctgtcaaagcaggcaaacgacaacaacaacagcaactttccctggactgcggctacaaagtatcatctaaatggccgggactcgttggttaatccaggaccagctatggccagccacaaagacgatgaagaaaagtttttccccatgcatggaaccctgatatttggtaaacaaggaacaaatgctaacgacgcggatttggacaatgtcatgattacagatgaagaagaaatccgcaccaccaatcccgtggctacggagcagtacgggactgtgtcaaataatttgcaaaactcaaatactggtccaactactggaactgtcaatcaccaaggagcgttacctggtatggtgtggcaggatcgagacgtgtaccttcagggacccatttgggccaagattcctcacaccgatggacactttcatccttctccactgatgggaggttttggactcaaacacccgcctcctcagatcatgatcaaaaacactcccgttccagccaatcctcctacaaacttcagttctgccaagtttgcttctttcatcacacagtattccacggggcaggtcagcgtggagatagagtgggagctgcagaaggagaacagcaaacgctggaaccccgagatccagtatacttccaactacaacaagtctgttaatgtggactttactgtggacactaatggtgtgtattcagagcctcgccccattggcaccagatacctgactcgtaatctgtaa

SEQ ID NO: 12370 - DNA, 2208 bp, Artificial Sequence
  source: /note="Description of Artificial Sequence: Synthetic polynucleotide"
atggctgccgatggttatcttccagattggctcgaggacactctctctgaaggaataagacagtggtggaagctcaaacctggcccaccaccgccaaagcccgcagagcggcataaggacgacagcaggggtcttgtgcttcctgggtacaagtacctcggacccttcaacggactcgacaaaggagagccggtcaacgaggcagacgccgcggccctcgagcacgacaaggcctacgaccggcagctcgacagcggagacaacccgtacctcaagtacaaccacgccgacgcggagtttcaggagcgccttaaagaagatacgtcttttgggggcaacctcgcaagagcagtattccaggcgaaaaagagggttcttgaacctctgggcctggttgaggagcctgttaagacggctccgggaaaaaagaggccggtagagcactctcctgcggagccagattcctcctccggaactggaaagtcgggccaacagcctgcaagaaagagattgaattttggtcagactggagacgcagactccgtacctgacccccagcctctcggacagccaccagcagccccctctggtctgggaactaatacgatggcttcaggcagtggcgcaccaatggcagacaataacgagggcgccgacggagtgggtaattcctcgggaaattggcattgcgattccacatggatgggcgacagagtcatcaccaccagcacccgcacctgggctctgcccacctacaacaaccatctgtacaagcaaatttccagccagtctggagccagcaacgacaaccactacttcggctacagcaccccttgggggtattttgacttcaacagattccactgccacttctccccacgtgactggcaaagactcatcaacaacaactggggattccgacccaaaagactcaacttcaagctctttaacattcaagtcaaagaggtcacgcagaatgacggtacgacgacgattgccaataaccttaccagcacggttcaggtgtttactgactcggagtaccagctcccgtacgtcctcggctcggcgcatcaaggatgcctcccgccgtttccagcggacgtcttcatggtcccacagtatggatacctcaccctgaacaacgggagtcaggcggtaggacgctcttccttttactgcctggagtactttccttctcagatgcttcgtaccggaaacaactttaccttcagttacacctttgaagacgttcctttccacagcagctacgctcacagtcaaagtctggaccggctgatgaatcctctgatagaccagtacctgtattatctaaacaaaacacaatcaaatagtggaactcttcagcagtctcggctactgtttagtcaagctggacccaccagcatgtctcttcaagctaaaaactggctgcctggaccttgctacagacaacagcgtctgtcaaagcaggcaaacgacaacaacaacagcaactttccctggactgcggctacaaagtatcatctaaatggccgggactcgttggttaatccaggaccagctatggccagccacaaagacgatgaagaaaagtttttccccatgcatggaaccctgatatttggtaaacaaggaacaaatgctaacgacgcggatttggacaatgtcatgattacagatgaagaagaaatccgcaccaccaatcccgtggctacggagcagtacgggactgtgtcaaataatttgcaaaactcaaatactggtccaactactggaactgtcaatcaccaaggagcgttacctggtatggtgtggcaggatcgagacgtgtaccttcagggacccatttgggccaagattcctcacaccgatggacactttcatccttctccactgatgggaggttttggactcaaacacccgcctcctcagatcatgatcaaaaacactcccgttccagccaatcctcctacaaacttcagttctgccaagtttgcttctttcatcacacagtattccacggggcaggtcagcgtggagatagagtgggagctgcagaaggagaacagcaaacgctggaaccccgagatccagtatacttccaactacaacaagtctgttaatgtggactttactgtggacactaatggtgtgtattcagagcctcgccccattggcaccagatacctgactcgtaatctgtaa

SEQ ID NO: 12371 - DNA, 2208 bp, Artificial Sequence
  source: /note="Description of Artificial Sequence: Synthetic polynucleotide"
atggctgccgatggttatcttccagattggctcgaggacactctctctgaaggaataagacagtggtggaagctcaaacctggcccaccaccgccaaagcccgcagagcggcataaggacgacagcaggggtcttgtgcttcctgggtataagtacctcggacccttcaacggactcgacaagggagagccggtcaacgaggcagacgccgcggccctcgagcacgacaaggcctacgaccggcagctcgacagcggagacaacccgtacctcaagtacaaccacgccgacgcggagtttcaggagcgccttaaagaagatacgtcttttgggggcaacctcggacgagcagtattccaggcgaaaaagagggttcttgaacctctgggcctggttgtggagcctgttaagacggctccgggaaaaaagaggccggtagagcactctcctgtggagccagactcctcctcgggaaccggaaaagcgggccagcagcctgcgagaaagagattgaattttgatcagactggagacgcagactccgtacctgacccccagcctctcggacagccaccagcagcccccacaagtttgggatctactacaatggctacaggcagtggcgcaccaatggcagacaataacgagggtgccgatggagtgggtaattcctcaggaaattggcattgcgattcccaatggtcgggcgacagagtcatcaccaccagcacccgaacctgggccctgcccacctacaacaaccacctctacaagcaaatctccagccgatcaggagccagcaacgacaaccactactttggctacagcaccccctgggggtattttgacttcaacggattccactgccacttttcaccacgtgactggcaaagactcatcaacaacaactggggattccgacccaagagactcaacttcaagctctttaacattcaagtcaaagaggtcacgcagaatgacggtacgacgacgattgccaataaccttaccagcacggttcaggtgtttactgactcggagtaccagctcccgcacgtcctcggctcggcgcatcaaggatgcctcccgccgtttccagcggacgtcttcatggtcccacagtatggatacctcaccctgaacaacgggagtcaggcggtaggacgctcttccttttactgcccggggtactttccttctcagatgcttcgtaccggaaacaactttaccttcagttacacctttgaagacgttcctttccacagcagctacgctcacagtcaaagtctggaccggctgatgaatcctcttatcgaccagtacctgtattatctaaacaaaacacaatcaaatagtggaactcttcagcagtctcggctactgtttagtcaagctggacctaccagcatgtctcttcaagctaaaaactggctgcctggaccttgctacagacaacagcgtctgtcaaagcaggcaaacggcaacaacaacagcaactttccctggactgcggctacaaagtatcatctaaatggccgggactcgttggttaatccaggaccagctatggccagccacaaagacgatgaagaaaagtttttccccatgcatggaaccctgatatttggcaaacaaggaacaaatgctaacgacgcggatttggacaatgtcatgattacagatgaagaagaaatccgtaccaccaatcccgtggctacggagcagtacgggactgtgtcaaataatttgcaaaactcaaatactggtccaactactggaactgtcaatcaccaaggagcgttacctggtatggtgtggcaggatcgagacgtgtaccttcagggacccatttgggccaagattcctcacaccgatggacactttcacccttctccgctgatgggaggttttggactcaaacacccgcctcctcagatcatgatcaaaaacactcccgttccagccaatcctcccacaaacttcagttctgccaagtttgcttctttcatcacacagtattccacgggacaggttagcgtggagatcgagtgggagctgcagaaggagaacagcaaacgctggaaccccgagatccagtacacttccaactacaacaagtctgttaatgtggactttactgtggacactaatggtgtgtattcagagcctcgccccattggcaccagatacctgactcgtaatctgtaa

SEQ ID NO: 12372 - DNA, 2208 bp, Artificial Sequence
  source: /note="Description of Artificial Sequence: Synthetic polynucleotide"
atggctgccgatggttatcttccagattggctcgaggacattctctctgaaggaataagacagtggtggaagctcaaacctggcccaccaccaccaaagcccgcagagcggcataaggacgacagcaggggtcttgtgcttcctgggtacaagtacctcggacccttcaacggactcgacaaaggagagccggtcaacgaggcagacgccgcggccctcgagcacgacaaggcctacgaccggcagctcgacagcggagacaacccgtacctcaagtacaaccacgccgacgcggagtttcaggggcgtcttaaagaagatacgtcttttgggggcaacctcggacgagcagtcttccaggcaaaaaagagggttcttgaacctctgggcctggttgaggaacctgttaagacggctccgggaaaaaagaggccggtagagcaatctcctgcggagccagactcctcctcgggaaccggaaaggcgggcaaccagcctgcaagaaagagattgaattttggtcagactggagacgcagactccgtacctgacccccagcctctcggacagccaccagcagccccctctggtctgggatctactacaatggctacaggcagtggcgcaccaatggcagacaataacgagggtgccgatggagtgggtaattcctcaggaaattggcattgcgattcccaatggttgggcgacagagtcatcaccaccagcacccgaacctgggccctgcccacctacaacaatcacctctacaagcaaatctccagccaatcaggagccagcaacgacaaccactactttggctacagcaccccctgggggtattttgacttcaacagattccactgccacttttcaccacgtgactggcaaagactcatcaacaacaactggggattccgacccaaaagactcaacttcaagctctttaacattcaagtcaaagaggtcacgcagaatgacggtacgacgacgattgccaataaccttaccagcacggttcaggtgtttactgactcggagtaccagctcccgtacgtcctcggctcggcgcatcaaggatgcctcccgccgtttccagcggacgtcttcatggtcccacagtatggatacctcaccctgaacaacgggagtcaggcggtaggacgctcttccttttactgcctggagtactttccttctcagatgcttcgtaccggaaacaactttaccttcagttacacctttgaagacgttcctttccacagcagctacgctcacagtcaaagtctggaccggctgatgaatcctctgatagaccagtacctgtattatctaaacaaaacacaatcaaatagtggaactcttcagcagtctcggctactgtttagtcaagctggacccaccagcatgtctcttcaagctaaaaactggctgcctggaccttgctacagacaacagcgtctgtcaaagcaggcaaacgacaacaacaacagcaactttccctggactgcggctacaaagtatcatctaaatggccgggactcgttggttaatccaggaccagctatggccagccacaaagacgatgaagaaaagtttttccccatgcatggaaccctgatatttggtaaacaaggaacaaatgctaacgacgcggatttggacaatgtcatgattacagatgaagaagaaatccgcaccaccaatcccgtggctacggagcagtacgggactgtgtcaaataatttgcaaaactcaaatactggtccaactactggaactgtcaatcaccaaggagcgttacctggtatggtgtggcaggatcgagacgtgtaccttcagggacccatttgggccaagattcctcacaccgatggacactttcatccttctccactgatgggaggttttggactcaaacacccgcctcctcagatcatgatcaaaaacactcccgttccagccaatcctcctacaaacttcagttctgccaagtttgcttctttcatcacacagtattccacggggcaggtcagcgtggagatagagtgggagctgcagaaggagaacagcaaacgctggaaccccgagatccagtatacttccaactacaacaagtctgttaatgtggactttactgtggacactaatggtgtgtattcagagcctcgccccattggcaccagatacctgactcgtaatctgtaa

SEQ ID NO: 12373 - DNA, 2208 bp, Artificial Sequence
  source: /note="Description of Artificial Sequence: Synthetic polynucleotide"
atggctgccgatggttatcttccagattggctcgaggacattctctctgaaggaataagacagtggtggaagctcaaacctggcccaccaccaccaaagcccgcagagcggcataaggacgacagcaggggtcttgtgcttcctgggtacaagtacctcggacccttcaacggactcgacaaaggagagccggtcaacgaggcagacgccgcggccctcgagcacgacaaggcctacgaccggcagctcgacagcggagacaacccgtacctcaagtacaaccacgccgacgcggagtttcaggagcgtcttaaagaagatacgtcttttgggggcaacctcggacgagcagtcttccaggcaaaaaagagggctcttgaacctctgggcctggttgaggaacctgttaagacggctccgggaaaaaagaggccggtagagcaatctcctgcggagccagactcctcctcgggaaccggaaaggcgggcaaccagcctgcaagaaagagatcgaattttggtcagactggagacgcagactccgtacctgacccccagcctctcggacagccaccagcagccccctctggtctgggatctactacaatggctacaggcagtggcgcaccaatggcagacaataacgagggtgccgatggagtgggtaattcctcaggaaattggcattgcgattcccaatggttgggcgacagagtcatcaccaccagcacccgaacctgggccctgcccacctacaacaatcacctctacaagcaaatctccagccaatcaggagccagcaacgacaaccactactttggctacagcaccccctgggggtattttgacttcaacagattccactgccacttttcaccacgtgactggcaaagactcatcaacaacaactggggattccgacccaaaagactcaacttcaagctctttaacattcaagtcaaagaggtcacgcagaatgacggtacgacgacgattgccaataaccttaccagcacggttcaggtgtttactgactcggagtaccagctcccgtacgtcctcggctcggcgcatcaaggatgcctcccgccgtttccagcggacgtcttcatggtcccacagtatggatacctcaccctgaacaacggaagtcaggcggtaggacgctcttccttttactgcctggagtactttccttctcagatgcttcgtaccggaaacaactttaccttcagttacacctttgaagacgttcctttccacagcagctacgctcacagtcaaagtctggaccggctgatgaatcctctgataggccagtacctgtattatctaaacaaaacacaatcaaatagtggaactcttcagcagtctcggctactgtttagtcaagctggacccaccagcatgtctcttcaagctaaaaactggctgcctggaccttgctacagacaacagcgtctgtcaaagcaggcaaacgacaacaacaacagcaactttccctggactgcggctacaaagtatcatctaaatggccgggactcgttggttaatccaggaccagctatggccagccacaaagacgatgaagaaaagtttttccccatgcatggaaccctgatatttggtaaacaaggaacaaatgctaacgacgcggatttggacaatgtcatgattacagatgaagaagaaatccgcaccaccaatcccgtggctacggagcagtacgggactgtgtcaaataatttgcaaaactcaaatactggtccaactactggaactgtcaatcaccaaggagcgttacctggtatggtgtggcaggatcgagacgtgtaccttcagggacccatttgggccaagattcctcacaccgatggacactttcatccttctccactgatgggaggttttggactcaaacacccgcctcctcagatcatgatcaaaaacactcccgttccagccaatcctcctacaaacttcagttctgccaagtttgcttctttcatcacacagtattccacggggcaggtcagcgtggagatagagtgggagctgcagaaggagaacagcaaacgctggaaccccgagatccagtatacttccaactacaacaagtctgttaatgtggactttactgtggacactaatggtgtgtattcagagcctcgccccattggcaccagatacctgactcgtaatctgtaa

SEQ ID NO: 12374 - DNA, 2217 bp, Artificial Sequence
  source: /note="Description of Artificial Sequence: Synthetic polynucleotide"
atggctgccgatggttatctcccagattggctcgaggacaacctctctgagggcattcgcgagtggtgggcactgaaacctggagccccgaagcccaaagccaaccagcaaaagcaggacgacggccggggtctggtgcttcctggctacaagtacctcggacccttcaacggactcgacaagggggagcccgtcaacgcggcggacgcggcggccctcgagcacgacaaggcctacgaccagcagctgcaggcgggtgacaatccgtacctgcggtataaccacgccgacgccgagtttcaggagcgtctgcaagaagatacgtcttttgggggcaacctcgggcgagcagtcttccaggccaagaagcgggttctcgaacctctcggtctggttgaggaaggcgctaagacggctcctggaaaggagagaccggtagagccatcaccccagcgttctccagactcctctacgggcatcggcaaggaaggccaacagcctgccagaaaaagactcaattttggtcagactggcgactcagagtcagttccagaccctcaacctctcggagaacctccagcagcgccctctggtgtgggacctaatacaatggctgcaggcggtggcgcaccaatggcagacaataacgaaggcgccgacggagtgggtagttcctcgggaaattggcattgcgattccacatggctgggcgacagagtcatcaccaccagcacccgaacctgggccctgcccacctacaacaaccacctctacaagcaaatctccaacgggacatcgggaggagccaccaacgacaacacctacttcggctacagcaccccctgggggtattttgactttaacagattccactgccacttttcaccacgtgactggcagcgactcatcaacaacaactggggattccggcccaagagactcagcttcaagctcttcaacatccaggtcaaggaggtcacgcagaatgaaggcaccaagaccaccgccaataacctcaccagcaccatccaggtgtttacggactcggagtaccagctgccgtacgttctcggctctgcccaccagggctgcctgcctccgttcccggcggacgtgttcacgattccccagtacggctacctaacactcaacaacggtagtcaggccgtgggacgctcctccttctactgcctggaatactttccttcgcagatgctgagaaccggcaacaacttccagtttacttacaccttcgaggacgtgcctttccacagcagctacgcccacagccagagcttggaccggctgatgaatcctctgattgaccagtacctgtactacttgtctcggattcaaacaacaggaggcacggcaaatacgcagactctgggcttcagccaaggtgggcctaatacaatggccaatcaggcaaagaactggctgccaggaccctgttaccgccaacaacgcgtctcaacgacaaccgggcaaaacaacaatagcaactttgcctggactgctgggaccaaataccatctgaatggaagaaattcattggctaatcctggcatcgctatggcaacacacaaagacgacgaggagcgtttttttcccagtaacgggatcctgatttttggcaaacaaaatgctgccagagacaatgcggattacagcgatgtcatgcccaccagcgaggaagaaatcaaaaccactaaccctgtggccacagaggaatacggtatcgtggcagataacttgcagcagcaaaacacggctcctcaaattggaactgtcaacagccagggggccttacccggtatggtctggcagaaccgggacgtgtacctgcagggtcccatctgggccaagattcctcacacggacggcaacttccacccgtctccgctgatgggcggctttggcctgaaacatcctccgcctcagatcctgatcaagaacacgcctgtacctgcggatcctccgaccaccttcaaccagtcaaagctgaactctttcatcacgcaatacagcaccggacaggtcagcgtggaaattgaatgggagctgcagaaggaaaacagcaagcgctggaaccccgagatccagtacacctccaactactacaaatctacaagtgtggactttgctgttaatacagaaggcgtgtactctgaaccccgccccattggcacccgttacctcactcgtaatctgtaa

SEQ ID NO: 12375 - DNA, 2217 bp, Artificial Sequence
  source: /note="Description of Artificial Sequence: Synthetic polynucleotide"
atggctgccgatggttatcttccagattggctcgaggacaacctctctgagggcattcgcgagtggtgggcgctgaaacctggagccccgaagcccaaagccaaccagcaaaagcaggacgacggccggggtctggtgcttcctggctacaagtacctcggacccttcaacggactcgacaagggggagcccgtcaacgcggcggacgcggcggccctcgagcacgacaaggcctacgaccagcagctgcaggcgggtgacaatccgtacctgcggtataaccacgccgacgccgagtttcaggagcgtctgcaagaagatacgtcttttgggggcaacctcgggcgagcagtcttccaggccaagaagcgggttctcgaacctctcggtctggttgaggaaggcgctaagacggctcctggaaagaagagaccggtagagccatcaccccagcgttctccagactcctctacgggcatcggcaaggggggccaacagcccgccagaaaaagactcaattttggtcagactggcgactcagagtcagttccagaccctcaacctctcggagaacctccagcagcgccctctggtgtgggacctaatacaatggctgcaggcggtggcgcaccaatggcagacaataacgaaggcgccgacggagtgggtagttcctcgggaaattggcattgcgattccacatggctgggcgacagagtcatcaccaccagcacccgaacctgggccctgcccacctacaacaaccacctctacaagcaaatctccaacgggacatcgggaggagccaccaacgacaacacctacttcggctacagcaccccctgggggtattttgactttaacagattccactgccacttttcaccacgtgactggcagcgactcatcaacaacaactggggattccggcccaagagactcagcttcaagctcttcaacatccaggtcaaggaggtcacgcagaatgaaggcaccaagaccatcgccaataacctcaccagcaccatccaggtgtttacggactcggagtaccagctgccgtacgttctcggctctgcccaccagggctgcctgcctccgttcccggcggacgtgttcacgattccccagtacggctacctaacactcaacaacggtagtcaggccgtgggacgctcctccttctactgcctggaatactttccttcgcagatgctgagaaccggcaacaacttccagtttacttacaccttcgaggacgtgcctttccacagcagctacgcccacagccagagcttggaccggctgatgaatcctctgattgaccagtacctgtactacttgtctcggattcaaacaacaggaggcacggcaaatacgcagactctgggcttcagccaaggtgggcctaatacaatggccaatcaggcaaagaactggctgccaggaccctgttaccgccaacaacgcgtctcaacgacaaccgggcaaaacaacaatagcaactttgcctggactgctgggaccaaataccatctgaatggaagaaattcattggctaatcctggcatcgctatggcaacacacaaagacgacgaggagcgtttttttcccagtaacgggatcctgatttttggcaaacaaaatgctgccagagacaatgcggattacagcgatgtcatgcccaccagcgaggaagaaatcaaaaccactaaccctgtggccacagaggaatacggtatcgtggcagataacttgcagcagcaaaacacggctcctcaaattggaactgtcaacagccagggggccttacccggtatggtctggcagaaccgggacgtgtacctgcagggtcccatctgggccaagattcctcacacggacggcaacttccacccgtctccgctgatgggcggctttggcctgaaacatcctccgcctcagatcctgatcaagaacacgcctgtacctgcggatcctccgaccaccttcaaccagtcaaagctgaactctttcatcacgcaatacagtaccggacaggtcagcgtggaaattgaatgggagctgcagaaggaaaacagcaagcgctggaaccccgagatccagtacacctccaactactacaaatctacaagtgtggactttgctgttaatacagaaggcgtgtactctgaaccccgccccattggcacccgttacctcacccgtaatctgtaa

SEQ ID NO: 12376 - DNA, 2217 bp, Artificial Sequence
  source: /note="Description of Artificial Sequence: Synthetic polynucleotide"
atggctgccgatggttatctcccagattggctcgaggacaacctctctgagggcattcgcgagtggtgggcactgaaacctggagccccgaagcccaaagccaaccagcaaaagcaggacgacggccggggtctggtgcttcctggctacaagtacctcggacccttcaacggactcgacaagggggagcccgtcaacgcggcggacgcggcggccctcgagcacgacaaggcctacgaccagcagctgcaggcgggtgacaatccgtacctgcggtataaccacgccgacgccgagtttcaggagcgtctgcaagaagatacgtcttttgggggcaacctcgggcgagcagtcttccaggccaagaagcgggttctcgaacctctcggtctggttgaggaaggcgctaagacggctcctggaaaggagagaccggtagagccatcaccccagcgttctccagactcctctacgggcatcggcaagaagggccaacagcctgccagaaaaagactcaattttggtcagactggcgactcagagtcagttccagaccctcaacctctcggagaacctccagcagcgccctctggtgtgggacctaatacaatggctgcaggcggtggcgcaccaatggcagacaataacgaaggcgccgacggagtgggtagttcctcgggaaattggcattgcgattccacatggctgggcgacagagtcatcaccaccagcacccgaacctgggccctgcccacctacaacaaccacctctacaagcaaatctccaacgggacatcgggaggagccaccaacgacaacacctacttcggctacagcaccccctgggggtattttgactttaacagattccactgccacttttcaccacgtgactggcagcgactcatcaacaacaactggggattccggcccaagagactcagcttcaagctcttcaacatccaggtcaaggaggtcacgcagaatgaaggcaccaagaccaccgccaataacctcaccagcaccatccaggtgtttacggactcggagtaccagctgccgtacgttctcggctctgcccaccagggctgcctgcctccgttcccggcggacgtgttcacgattccccagtacggctacctaacactcaacaacggtagtcaggccgtgggacgctcctccttctactgcctggaatactttccttcgcagatgctgagaaccggcaacaacttccagtttacttacaccttcgaggacgcgcctttccacagcagctacgcccacagccagagcttggaccggctgatgaatcctctgattgaccagtacctgtactacttgtctcggattcaaacaacaggaggcacggcaaatacgcagactctgggcttcagccaaggtgggcctaatacaatggccaatcaggcaaagaactggctgccaggaccctgttaccgccaacaacgcgtctcaacgacaaccgggcaaaacaacaatagcaactttgcctggactgctgggaccaaataccatctgaatggaagaaattcattggctaatcctggcatcgctatggcaacacacaaagacgacgaggagcgtttttttcccagtaacgggatcctgatttttggcaaacaaaatgctgccagagacaatgcggattacagcgatgtcatgcccaccagcgaggaagaaatcaaaaccactaaccctgtggccacagaggaatacggtatcgtggcagataacttgcagcagcaaaacacggctcctcaaattggaactgtcaacagccagggggccttacccggtatggtctggcagaaccgggacgtgtacctgcagggtcccatctgggccaagattcctcacacggacggcaacttccacccgtctccgctgatgggcggctttggcctgaaacatcctccgcctcagatcctgatcaagaacacgcctgtacctgcggatcctccgaccaccttcaaccagtcaaagctgaactctttcatcacgcaatacagcaccggacaggtcagcgtggaaattgaatgggagctgcagaaggaaaacagcaagcgctggaaccccgagatccagtacacctccaactactacaaatctacaagtgtggactttgctgttaatacagaaggcgtgtactctgaaccccgccccattggcacccgttacctcactcgtaatctgtaa

SEQ ID NO: 12377 - DNA, 2217 bp, Artificial Sequence
  source: /note="Description of Artificial Sequence: Synthetic polynucleotide"
atggctgccgatggttatcttccagattggctcgaggacaacctctctgagggcattcgcgagtggtgggcgctgaaacctggagccccgaagcccaaagccaaccagcaaaagcaggacgacggccggggtctggtgcttcctggctacaagtacctcggacccttcaacggactcgacaagggggagcccgtcaacgcggcggacgcggcggccctcgagcacgacaaggcctacgaccagcagctgcaggcgggtgacaatccgtacctgcggtataaccacgccgacgccgagtttcaggagcgtctgcaagaagatacgtcttttgggggcaacctcgggcgagcagtcttccaggccaagaagcgggttctcgaacctctcggtctggttgaggaaggcgctaagacggctcctggaaagaagagaccggtagagccatcaccccagcgttctccagactcctctacgggcatcggcaaggagggccaacagcccgccagaaaaagactcaattttggtcagactggcgactcagagtcagttccagaccctcaacctctcggagaacctccagcagcgccctctggtgtgggacctaatacaatggctgcaggcggtggcgcaccaatggcagacaataacgaaggcgccgacggagtgggtagttcctcgggaaattggcattgcgattccacatggctgggcgacagagtcatcaccaccagcacccgaacctgggccctgcccacctacaacaaccacctctacaagcaaatctccaacgggacatcgggaggagccaccaacgacaacacctacttcggctacagcaccccctgggggtattttgactttaacagattccactgccacttttcaccacgtgactggcagcgactcatcaacaacaactggggattccggcccaagagactcagcttcaagctcttcaacatccaggtcaaggaggtcacgcagaatgaaggcaccaagaccatcgccaataacctcaccagcaccatccaggtgtttacggactcggagtaccagctgccgtacgttctcggctctgcccaccagggctgcctgcctccgttcccggcggacgtgttcacgattccccagtacggctacctaacactcaacaacggtagtcaggccgtgggacgctcctccttctactgcctggaatactttccttcgcagatgctgagaaccggcaacaacttccagtttacttacaccttcgaggacgtgcctttccacagcagctacgcccacagccagagcttggaccggctgatgaatcctctgattgaccagtacctgtactacttgtctcggattcaaacaacaggaggcacggcaaatacgcagactctgggcttcagccaaggtgggcctaatacaatggccaatcaggcaaagaactggctgccaggaccctgttaccgccaacaacgcgtctcaacgacaaccgggcaaaacaacaatagcaactttgcctggactgctgggaccaaataccatctgaatggaagaaattcattggctaatcctggcatcgctatggcaacacacaaagacgacgaggagcgtttttttcccagtaacgggatcctgatttttggcaaacaaaatgctgccagagacaatgcggattacagcgatgtcatgcccaccagcgaggaagaaatcaaaaccactaaccctgtggccacagaggaatacggtatcgtggcagataacttgcagcagcaaaacacggctcctcaaattggaactgtcaacagccagggggccttacccggtatggtctggcagaaccgggacgtgtacctgcagggtcccatctgggccaagattcctcacacggacggcaacttccacccgtctccgctgatgggcggctttggcctgaaacatcctccgcctcagatcctgatcaagaacacgcctgtacctgcggatcctccgaccaccttcaaccagtcaaagctgaactctttcatcacgcaatactgtaccggacaggtcagcgtggaaattgaatgggagctgcagaaggaaaacagcaagcgctggaaccccgagatccagtacacctccaactactacaaatctacaagtgtggactttgctgttaatacagaaggcgtgtactctgaaccccgccccattggcacccgttacctcactcgtaatctgtaa

SEQ ID NO: 12378 - DNA, 2217 bp, Artificial Sequence
  source: /note="Description of Artificial Sequence: Synthetic polynucleotide"
atggctgccgatggttatcttccagattggctcgaggacaacctctctgagggcattcgcgagtggtgggcgctgaaacctggagccccgaagcccaaagccaaccagcaaaagcaggacgacggccggggtctggtgcttcctggctacaagtacctcggacccttcaacggactcgacaagggggagcccgtcaacgcggcggacgcggcggccctcgagcacgacaaggcctacgaccagcagctgcaggcgggtgacaatccgtacctgcggtataaccacgccgacgccgagtttcaggagcgtctgcaagaagatacgtcttttgggggcaacctcgggcgagcagtcttccaggccaagaagcgggttctcgaacctctcggtctggttgaggaaggcgctaagacggctcctggaaagaagagaccggtagagccatcaccccagcgttctccagactcctctacgggcatcggcaaggagggccaacagcccgccagaaaaagactcaattttggtcagactggcgactcagagtcagttccagaccctcaacctctcggagaacctccagcagcgccctctggtgtgggacctaatacaatggctgcaggcggtggcgcaccaatggcagacaataacgaaggcgccgacggagtgggtagttcctcgggaaattggcattgcgattccacatggctgggcgacagagtcatcaccaccagcacccgaacctgggccctgcccacctacaacaaccacctctacaagcaaatctccaacgggacatcgggaggagccaccaacgacaacacctacttcggctacagcaccccctgggggtattttgactttaacagattccactgccacttttcaccacgtgactggcagcgactcatcaacaacaactggggattccggcccaagagactcagcttcaagctcttcaacatccaggtcaaggaggtcacgcagaatgaaggcaccaagaccatcgccaataacctcaccagcaccatccaggtgtttacggactcggagtaccagctgccgtacgttctcggctctgcccaccagggctgcctgcctccgttcccggcggacgtgttcacgattccccagtacggctacctaacactcaacaacggtagtcaggccgtgggacgctcctccttctactgcctggaatactttccttcgcagatgctgagaaccggcaacaacttccagtttacttacaccttcgaggacgtgcctttccacagcagctacgcccacagccagagcttggaccggctgatgaatcctctgattgaccagtacctgtactacttgtctcggattcaaacaacaggaggcacggcaaatacgcagactctgggcttcagccaaggtgggcctaatacaatggccaatcaggcaaagaactggctgccaggaccctgttaccgccaacaacgcgtctcaacgacaaccgggcaaaacaacaatagcaactttgcctggactgctgggaccaaataccatctgaatggaagaaattcattggctaatcctggcatcgctatggcaacacacaaagacgacgaggagcgtttttttcccagtaacgggatcctgatttttggcaaacaaaatgctgccagagacaatgcggattacagcgatgtcatgcccaccagcgaggaagaaatcaaaaccactaaccctgtggccacagaggaatacggtatcgtggcagataacttgcagcagcaaaacacggctcctcaaattggaactgtcaacagccagggggccttacccggtatggtctggcagaaccgggacgtgtacctgcagggtcccatctgggccaagattcctcacacggacggcaacttccacccgtctccgctgatgggcggctttggcctgaaacatcctccgcctcagatcctgatcaagaacacgcctgtacctgcggatcctccgaccaccttcaaccagtcaaagctgaactctttcatcacgcaatacagcaccggacaggtcagcgtggaaattgaatgggagctgcagaaggaaaacagcaagcgctggaaccccgagatccagtacacctccaactactacaaatctacaagtgtggactttgctgttaatacagaaggcgtgtactctgaaccccgccccattggcacccgttacctcacccgtaatctgtaa

SEQ ID NO: 12379 - DNA, 2217 bp, Artificial Sequence
  source: /note="Description of Artificial Sequence: Synthetic polynucleotide"
atggctgccgatggttatctcccagattggctcgaggacaacctctctgagggcattcgcgagtggtgggcactgaaacctggagccccgaagcccaaagccaaccagcaaaagcaggacgacggccggggtctggtgcttcctggctacaagtacctcggacccttcaacggactcgacaagggggagcccgtcaacgcggcggacgcggcggccctcgagcacgacaaggcctacgaccagcagctgcaggcgggtgacaatccgtacctgcggtataaccacgccgacgccgagtttcaggagcgtctgcaagaagatacgtcttttgggggcaacctcgggcgagcagtcttccaggccaagaagcgggttctcgaacctctcggtctggttgaggaaggcgctaagacggctcctggaaaggagagaccggtagagccatcaccccagcgttctccagactcctctacgggcatcggcaagaagggccaacagcctgccagaaaaagactcaattttggtcagactggcgactcagagtcagttccagaccctcaacctctcggagaacctccagcagcgccctctggtgtgggacctaatacaatggctgcaggcggtggcgcaccaatggcagacaataacgaaggcgccgacggagtgggtagttcctcgggaaattggcattgcgattccacatggctgggcgacagagtcatcaccaccagcacccgaacctgggccctgcccacctacaacaaccacctctacaagcaaatccccaacgggacatcgggaggagccaccaacgacaacacctacttcggctacagcaccccctgggggtattttgactttaacagattccactgccacttttcaccacgtgactggcagcgactcatcaacaacaactggggattccggcccaagagactcagcttcaagctcttcaacatccaggtcaaggaggtcacgcagaatgaaggcaccaagaccaccgccaataacctcaccagcaccatccaggtgtttacggactcggagtaccagctgccgtacgttctcggctctgcccaccagggctgcctgcctccgttcccggcggacgtgttcacgattccccagtacggctacctaacactcaacaacggtagtcaggccgtgggacgctcctccttctactgcctggaatactttccttcgcagatgctgagaaccggcaacaacttccagtttacttacaccttcgaggacgtgcctttccacagcagctacgcccacagccagagcttggaccggctgatgaatcctctgattgaccagtacctgtactacttgtctcggattcaaacaacaggaggcacggcaaatacgcagactctgggcttcagccaaggtgggcctaatacaatggccaatcaggcaaagaactggctgccaggaccctgttaccgccaacaacgcgtctcaacgacaaccgggcaaaacaacaatagcaactttgcctggactgctgggaccaaataccatctgaatggaagaaattcattggctaatcctggcatcgctatggcaacacacaaagacgacgaggagcgtttttttcccagtaacgggatcctgatttttggcaaacaaaatgctgccagagacaatgcggattacagcgatgtcatgcccaccagcgaggaagaaatcaaaaccactaaccctgtggccacagaggaatacggtatcgtggcagataacttgcagcagcaaaacacggctcctcaaattggaactgtcaacagccagggggccttacccggtatggtctggcagaaccgggacgtgtacctgcagggtcccatctgggccaagattcctcacacggacggcaacttccacccgtctccgctgatgggcggctttggcctgaaacatcctccgcctcagatcctgatcaagaacacgcctgtacctgcggatcctccgaccaccttcaaccagtcaaagctgaactctttcatcacgcaatacagcaccggacaggtcagcgtggaaattgaatgggagctgcagaaggaaaacagcaagcgctggaaccccgagatccagtacacctccaactactacaaatctacaagtgtggactttgctgttaatacagaaggcgtgtactctgaaccccgccccattggcacccgttacctcacccgtaatctgtaa

SEQ ID NO: 12380 - DNA, 2217 bp, Artificial Sequence
  source: /note="Description of Artificial Sequence: Synthetic polynucleotide"
atggctgccgatggttatcttccagattggctcgaggacaacctctctgagggcattcgcgagtggtgggcgctgaaacctggagccccgaagcccaaagccaaccagcaaaagcaggacgacggccggggtctggtgcttcctggctacaagtacctcggacccttcaacggactcgacaagggggagcccgtcaacgcggcggacgcggcggccctcgagcacgacaaggcctacgaccagcagctgcaggcgggtgacaatccgtacctgcggtataaccacgccgacgccgagtttcaggagcgtctgcaagaagatacgtcttttgggggcaacctcgggcgagcagtcttccaggccaagaagcgggttctcgaacctctcggtctggttgaggaaggcgctaagacggctcctggaaagaagagaccggtagagccatcaccccagcgttctccagactcctctacgggcatcggcaaggagggccaacagcccgccagaaaaagactcaattttggtcagactggcgactcagagtcagttccagaccctcaacctctcggagaacctccagcagcgccctctggtgtgggacctaatacaatggctgcaggcggtggcgcaccaatggcagacaataacgaaggcgccgacggagtgggtagttcctcgggaaattggcattgcgattccacatggctgggcgacagagtcatcaccaccagcacccgaacctgggccctgcccacctacaacaaccacctctacaagcaaatctccaacgggacatcgggaggagccaccaacgacaacacctacttcggctacagcaccccctgggggtattttgactttaacagattccactgccacttttcaccacgtgactggcagcgactcatcaacaacaactggggattccggcccaagagactcagcttcaagctcttcaacatccaggtcaaggaggtcacgcagaatgaaggcaccaagaccaccgccaataacctcaccagcaccatccaggtgtttacggactcggagtaccagctgccgtacgttctcggctctgcccaccagggctgcctgcctccgttcccggcggacgtgttcacgattccccagtacggctacctaacactcaacaacggtagtcaggccgtgggacgctcctccttctactgcctggaatactttccttcgcagatgctgagaaccggcaacaacttccagtttacttacaccttcgaggacgtgcctttccacagcagctacgcccacagccagagcttggaccggctgatgaatcctctgattgaccagtacctgtactacttgtctcggattcaaacaacaggaggcacggcaaatacgcagactctgggcttcagccaaggtgggcctaatacaatggccaatcaggcaaagaactggctgccaggaccctgttaccgccaacaacgcgtctcaacgacaaccgggcaaaacaacaatagcaactttgcctggactgctgggaccaaataccatctgaatggaagaaattcattggctaatcctggcatcgctatggcaacacacaaagacgacgaggagcgtttttttcccagtaacgggatcctgatttttggcaaacaaaatgctgccagagacaatgcggattacagcgatgtcatgcccaccagcgaggaagaaatcaaaaccactaaccctgtggccacagaggaatacggtatcgtggcagataacttgcagcagcaaaacacggctcctcaaattggaactgtcaacagccagggggccttacccggtatggtctggcagaaccgggacgtgtacctgcagggtcccatctgggccaagattcctcacacggacggcaacttccacccgtctccgctgatgggcggctttggcctgaaacatcctccgcctcagatcctgatcaagaacacgcctgtacctgcggatcctccgaccaccttcaaccagtcaaagctgaactctttcatcacgcaatacagcaccggacaggtcagcgtggaaattgaatgggagctgcagaaggaaaacagcaagcgctggaaccccgagatccagtacacctccaactactacaaatctacaagtgtggactttgctgttaatacagaaggcgtgtactctgaaccccgccccattggcacccgttacctcacccgtaatctgtaa

SEQ ID NO: 12381 - DNA, 2217 bp, Artificial Sequence
  source: /note="Description of Artificial Sequence: Synthetic polynucleotide"
atggctgccgatggttatctcccagattggctcgaggacaacctctctgagggcattcgcgagtggtgggcactgaaacctggagccccgaagcccaaagccaaccagcaaaagcaggacgacggccggggtctggtgcttcctggctacaagtacctcggacccttcaacggactcgacaagggggagcccgtcaacgcggcggacgcggcggccctcgagcacgacaaggcctacgaccagcagctgcaggcgggtgacaatccgtacctgcggtataaccacgccgacgccgagtttcaggagcgtctgcaagaagatacgtcttttgggggcaacctcgggcgagcagtcttccaggccaagaagcgggttctcgaacctctcggtctggttgaggaaggcgctaagacggctcctggaaaggagagaccggtagagccatcaccccagcgttctccagactcctctacgggcatcggcaagaagggccaacagcctgccagaaaaagactcaattttggtcagactggcgactcagagtcagttccagaccctcaacctctcggagaacctccagcagcgccctctggtgtgggacctaatacaatggctgcaggcggtggcgcaccaatggcagacaataacgaaggcgccgacggagtgggtagttcctcgggaaattggcattgcgattccacatggctgggcgacagagtcatcaccaccagcacccgaacctgggccctgcccacctacaacaaccacctctacaagcaaatctccaacgggacatcgggaggagccaccaacgacaacacctacttcggctacagcaccccctgggggtattttgactttaacagattccactgccacttttcaccacgtgactggcagcgactcatcaacaacaactggggattccggcccaagagactcagcttcaagctcttcaacatccaggtcaaggaggtcacgcagaatgaaggcaccaagaccaccgccaataacctcaccagcaccatccaggtgtttacggactcggagtaccagctgccgtacgttctcggctctgcccaccagggctgcctgcctccgttcccggcggacgtgttcacgattccccagtacggctacctaacactcaacaacggtagtcaggccgtgggacgctcctccttctactgcctggaatactttccttcgcagatgctgagaaccggcaacaacttccagtttacttacaccttcgaggacgtgcctttccacagcagctacgcccacagccagagcttggaccggctgatgaatcctctgattgaccagtacctgtactacttgtctcggattcaaacaacaggaggcacggcaaatacgcagactctgggcttcagccaaggtgggcctaatacaatggccaatcaggcaaagaactggctgccaggaccctgttaccgccaacaacgcgtctcaacgacaaccgggcaaaacaacaatagcaactttgcctggactgctgggaccaaataccatctgaatggaagaaattcattggctaatcctggcatcgctatggcaacacacaaagacgacgaggagcgtttttttcccagtaacgggatcctgatttttggcaaacaaaatgctgccagagacaatgcggattacagcgatgtcatgcccaccagcgaggaagaaatcaaaaccactaaccctgtggccacagaggaatacggtatcgtggcagataacttgcagcagcaaaacacggctcctcaaattggaactgtcaacagccagggggccttacccggtatggtctggcagaaccgggacgtgtacctgcagggtcccatctgggccaagattcctcacacggacggcaacttccacccgtctccgctgatgggcggctttggcctgaaacatcctccgcctcagatcctgatcaagaacacgcctgtacctgcggatcctccgaccaccttcaaccagtcaaagctgaactctttcatcacgcaatacagtaccggacaggtcagcgtggaaattgaatgggagctgcagaaggaaaacagcaagcgctggaaccccgagatccagtacacctccaactactacaaatctacaagtgtggactttgctgttaatacagaaggcgtgtactctgaaccccgccccattggcacccgttacctcacccgtaatctgtaa

SEQ ID NO: 12382 - DNA, 2217 bp, Artificial Sequence
  source: /note="Description of Artificial Sequence: Synthetic polynucleotide"
atggctgccgatggttatctcccagattggctcgaggacaacctctctgagggcattcgcgagtggtgggcactgaaacctggagccccgaagcccaaagccaaccagcaaaagcaggacgacggccggggtctggtgcttcctggctacaagtacctcggacccttcaacggactcgacaagggggagcccgtcaacgcggcggacgcggcggccctcgagcacgacaaggcctacgaccagcagctgcaggcgggtgacaatccgtacctgcggtataaccacgccgacgccgagtttcaggagcgtctgcaagaagatacgtcttttgggggcaacctcgggcgagcagtcttccaggccaagaagcgggttctcgaacctctcggtctggttgaggaaggcgctaagacggctcctggaaaggagagaccggtagagccatcaccccagcgttctccagactcctctacgggcatcggcaagaagggccaacagcctgccagaaaaagactcaattttggtcagactggcgactcagagtcagttccagaccctcaacctctcggagaacctccagcagcgccctctggtgtgggacctaatacaatggctgcaggcggtggcgcaccaatggcagacaataacgaaggcgccgacggagtgggtagttcctcgggaaattggcattgcgattccacatggctgggcgacagagtcatcaccaccagcacccgaacctgggccctgcccacctacaacaaccacctctacaagcaaatctccaacgggacatcgggaggagccaccaacgacaacacctacttcggctacagcaccccctgggggtattttgactttaacagattccactgccacttttcaccacgtgactggcagcgactcatcaacaacaactggggattccggcccaagagactcagcttcaagctcttcaacatccaggtcaaggaggtcacgcagaatgaaggcaccaagaccatcgccaataacctcaccagcaccatccaggtgtttacggactcggagtaccagctgccgtacgttctcggctctgcccaccagggctgcctgcctccgttcccggcggacgtgttcacgattccccagtacggctacctaacactcaacaacggtagtcaggccgtgggacgctcctccttctactgcctggaatactttccttcgcagatgctgagaaccggcaacaacttccagtttacttacaccttcgaggacgtgcctttccacagcagctacgcccacagccagagcttggaccggctgatgaatcctctgattgaccagtacctgtactacttgtctcggattcaaacaacaggaggcacggcaaatacgcagactctgggcttcagccaaggtgggcctaatacaatggccaatcaggcaaagaactggctgccaggaccctgttaccgccaacaacgcgtctcaacgacaaccgggcaaaacaacaatagcaactttgcctggactgctgggaccaaataccatctgaatggaagaaattcattggctaatcctggcatcgctatggcaacacacaaagacgacgaggagcgtttttttcccagtaacgggatcctgatttttggcaaacaaaatgctgccagagacaatgcggattacagcgatgtcatgcccaccagcgaggaagaaatcaaaaccactaaccctgtggccacagaggaatacggtatcgtggcagataacttgcagcagcaaaacacggctcctcaaattggaactgtcaacagccagggggccttacccggtatggtctggcagaaccgggacgtgtacctgcagggtcccatctgggccaagattcctcacacggacggcaacttccacccgtctccgctgatgggcggctttggcctgaaacatcctccgcctcagatcctgatcaagaacacgcctgtacctgcggatcctccgaccaccttcaaccagtcaaagctgaactctttcatcacgcaatacagtaccggacaggtcagcgtggaaattgaatgggagctgcagaaggaaaacagcaagcgctggaaccccgagatccagtacacctccaactactacaaatctacaagtgtggactttgctgttaatacagaaggcgtgtactctgaaccccgccccattggcacccgttacctcacccgtaatctgtaa

SEQ ID NO: 12383 - DNA, 2217 bp, Artificial Sequence
  source: /note="Description of Artificial Sequence: Synthetic polynucleotide"
atggctgccgatggttatcttccagattggctcgaggacaacctctctgagggcattcgcgagtggtgggcgctgaaacctggagccccgaagcccaaagccaaccagcaaaagcaggacgacggccggggtctggtgcttcctggctacaagtacctcggacccttcaacggactcgacaagggggagcccgtcaacgcggcggacgcggcggccctcgagcacgacaaggcctacgaccagcagctgcaggcgggtgacaatccgtacctgcggtataaccacgccgacgccgagtttcaggagcgtctgcaagaagatacgtcttttgggggcaacctcgggcgagcagtcttccaggccaagaagcgggttctcgaacctctcggtctggttgaggaaggcgctaagacggctcctggaaagaagagaccggtagagccatcaccccagcgttctccagactcctctacgggcatcggcaagaagggccaacagcccgccagaaaaagactcaattttggtcagactggcgactcagagtcagttccagaccctcaacctctcggagaacctccagcagcgccctctggtgtgggacctaatacaatggctgcaggcggtggcgcaccaatggcagacaataacgaaggcgccgacggagtgggtagttcctcgggaaattggcattgcgattccacatggctgggcgacagagtcatcaccaccagcacccgaacctgggccctgcccacctacaacaaccacctctacaagcaaatctccaacgggacatcgggaggagccaccaacgacaacacctacttcggctacagcaccccctgggggtattttgactttaacagattccactgccacttttcaccacgtgactggcagcgactcatcaacaacaactggggattccggcccaagagactcagcttcaagctcttcaacatccaggtcaaggaggtcacgcagaatgaaggcaccaagaccatcgccaataacctcaccagcaccatccaggtgtttacggactcggagtacccgctgccgtacgttctcggctctgcccaccagggctgcctgcctccgttcccggcggacgtgttcacgattccccagtacggctacctaacactcaacaacggtagtcaggccgtgggacgctcctccttctactgcctggaatactttccttcgcagatgctgagaaccggcaacaacttccagtttacttacaccttcgaggacgtgcctttccacagcagctacgcccacagccagagcttggaccggctgatgaatcctctgattgaccagtacctgtactacttgtctcggattcaaacaacaggaggcacggcaaatacgcagactctgggcttcagccaaggtgggcctaatacaatggccaatcaggcaaagaactggctgccaggaccctgttaccgccaacaacgcgtctcaacgacaaccgggcaaaacaacaatagcaactttgcctggactgctgggaccaaataccatctgaatggaagaaattcattggctaatcctggcatcgctatggcaacacacaaagacgacgaggagcgtttttttcccagtaacgggatcctgatttttggcaaacaaaatgctgccagagacaatgcggattacagcgatgtcatgcccaccagcgaggaagaaatcaaaaccactaaccctgtggccacagaggaatacggtatcgtggcagataacttgcagcagcaaaacacggctcctcaaattggaactgtcaacagccagggggccttacccggtatggtctggcagaaccgggacgtgtacctgcagggtcccatctgggccaagattcctcacacggacggcaacttccacccgtctccgctgatgggcggctttggcctgaaacatcctccgcctcagatcctgatcaagaacacgcctgtacctgcggaccctccgaccaccttcaaccagtcaaagctgaactctttcatcacgcaatacagcaccggacaggtcagcgtggaaattgaatgggagctgcagaaggaaaacagcaagcgctggaaccccgagatccagtacacctccaactactacaaatctacaagtgtggactttgctgttaatacagaaggcgtgtactctgaaccccgccccattggcacccgttacctcacccgtaatctgtaa

SEQ ID NO: 12384 - DNA, 2217 bp, Artificial Sequence
  source: /note="Description of Artificial Sequence: Synthetic polynucleotide"
atggctgccgatggttatcttccagattggctcgaggacaacctctctgagggcattcgcgagtggtgggcgctgaaacctggagccccgaagcccaaagccaaccagcaaaagcaggacgacggccggggtctggtgcttcctggctacaagtacctcggacccttcaacggactcgacaagggggagcccgtcaacgcggcggacgcggcggccctcgagcacgacaaggcctacgaccagcagctgcaggcgggtgacaatccgtacctgcggtataaccacgccgacgccgagtttcaggagcgtctgcaagaagatacgtcttttgggggcaacctcgggcgagcagtcttccaggccaagaagcgggttctcgaacctctcggtctggttgaggaaggcgctaagacggctcctggaaagaagagaccggtagagccatcaccccagcgttctccagactcctctacgggcatcggcaagaagggccaacagcccgccagaaaaagactcaattttggtcagactggcgactcagagtcagttccagaccctcaacctctcggagaacctccagcagcgccctctggtgtgggacctaatacaatggctgcaggcggtggcgcaccaatggcagacaataacgaaggcgccgacggagtgggtagttcctcgggaaattggcattgcgattccacatggctgggcgacagagtcatcaccaccagcacccgaacctgggccctgcccacctacaacaaccacctctacaagcaaatctccaacgggacatcgggaggagccaccaacgacaacacctacttcggctacagcaccccctgggggtattttgactttaacagattccactgccacttttcaccacgtgactggcagcgactcatcaacaacaactggggattccggcccaagagactcagcttcaagctcttcaacatccaggtcaaggaggtcacgcagaatgaaggcaccaagaccatcgccaataacctcaccagcaccatccaggtgtttacggactcggagtaccagctgccgtacgttctcggctctgcccaccagggctgcctgcctccgttcccggcggacgtgttcacgattccccagtacggctacctaacactcaacaacggtagtcaggccgtgggacgctcctccttctactgcctggaatactttccttcgcagatgctgagaaccggcaacaacttccagtttacttacaccttcgaggacgtgcctttccacagcagctacgcccacagccagagcttggaccggctgatgaatcctctgattgaccagtacctgtactacttgtctcggattcaaacaacaggaggcacggcaaatacgcagactctgggcttcagccaaggtgggcctaatacaatggccaatcaggcaaagaactggctgccaggaccctgttaccgccaacaacgcgtctcaacgacaaccgggcaaaacaacaatagcaactttgcctggactgctgggaccaaataccatctgaatggaagaaattcattggctaatcctggcatcgctatggcaacacacaaagacgacgaggagcgtttttttcccagtaacgggatcctgatttttggcaaacaaaatgctgccagagacaatgcggattacagcgatgtcatgcccaccagcgaggaagaaatcaaaaccactaaccctgtggccacagaggaatacggtatcgtggcagataacttgcagcagcaaaacacggctcctcaaattggaactgtcaacagccagggggccttacccggtatggtctggcagaaccgggacgtgtacctgcagggtcccatctgggccaagattcctcacacggacggcaacttccacccgtctccgctgatgggcggctttggcctgaaacatcctccgcctcagatcctgatcaagaacacgcctgtacctgcggatcctccgaccaccttcaaccagtcaaagctgaactctttcatcacgcaatacggcaccggacaggtcagcgtggaaattgaatgggagctgcagaaggaaaacagcaagcgctggaaccccgagatccagtacacctccaactactacaaatctacaagtgtggactttgctgttaatacagaaggcgtgtactctgaaccccgccccattggcacccgttacctcacccgtaatctgtaa

SEQ ID NO: 12385 - DNA, 2217 bp, Artificial Sequence
  source: /note="Description of Artificial Sequence: Synthetic polynucleotide"
atggctgccgatggttatcttccagattggctcgaggacaacctctctgagggcattcgcgagtggtgggcgctgaaacctggagccccgaagcccaaagccaaccagcaaaagcaggacgacggccggggtctggtgcttcctggctacaagtacctcggacccttcaacggactcgacaagggggagcccgtcaacgcggcggacgcggcggccctcgagcacgacaaggcctacgaccagcagctgcaggcgggtgacaatccgtacctgcggtataaccacgccgacgccgagtttcaggagcgtctgcaagaagatacgtcttttgggggcaacctcgggcgagcagtcttccaggccaagaagcgggttctcgaacctctcggtctggttgaggaaggcgctaagacggctcctggaaagaagagaccggtagagccatcaccccagcgttctccagactcctctacgggcatcggcaagaagggccaacagcccgccagaaaaagactcaattttggtcagactggcgactcagagtcagttccagaccctcaacctctcggagaacctccagcagcgccctctggtgtgggacctaatacaatggctgcaggcggtggcgcaccaatggcagacaataacgaaggcgccgacggagtgggtagttcctcgggaaattggcattgcgattccacatggctgggcgacagagtcatcaccaccagcacccgaacctgggccctgcccacctacaacaaccacctctacaagcaaatctccaacgggacatcgggaggagccaccaacgacaacacctacttcggctacagcaccccctgggggtattttgactttaacagattccactgccacttttcaccacgtgactggcagcgactcatcaacaacaactggggattccggcccaagagactcagcttcaagcccttcaacatccaggtcaaggaggtcacgcagaatgaaggcaccaagaccatcgccaataacctcaccagcaccatccaggtgtttacggactcggagtaccagctgccgtacgttctcggctctgcccaccagggctgcctgcctccgttcccggcggacgtgttcacgattccccagtacggctacctaacactcaacaacggtagtcaggccgtgggacgctcctccttctactgcctggaatactttccttcgcagatgctgagaaccggcaacaacttccagtttacttacaccttcgaggacgtgcctttccacagcagctacgcccacagccagagcttggaccggctgatgaatcctctgattgaccagtacctgtactacttgtctcggattcaaacaacaggaggcacggcaaatacgcagactctgggcttcagccaaggtgggcctaatacaatggccaatcaggcaaagaactggctgccaggaccctgttaccgccaacaacgcgtctcaacgacaaccgggcaaaacaacaatagcaactttgcctggactgctgggaccaaataccatctgaatggaagaaattcattggctaatcctggcatcgctatggcaacacacaaagacgacgaggagcgtttttttcccagtaacgggatcctgatttttggcaaacaaaatgctgccagagacaatgcggattacagcgatgtcatgcccaccagcgaggaagaaatcaaaaccactaaccctgtggccacagaggaatacggtatcgtggcagataacttgcagcagcaaaacacggctcctcaaattggaactgtcaacagccagggggccttacccggtatggtctggcagaaccgggacgtgtacctgcagggtcccatctgggccaagattcctcacacggacggcaacttccacccgtctccgctgatgggcggctttggcctgaaacatcctccgcctcagatcctgatcaagaacacgcctgtacctgcggatcctccgaccaccttcaaccagtcaaagctgaactctttcatcacgcaatacagcaccggacaggtcagcgtggaaattgaatgggagctgcagaaggaaaacagcaagcgctggaaccccgagatccagtacacctccaactactacaaatctacaagtgtggactttgctgttaatacagaaggcgtgtactctgaaccccgccccattggcacccgttacctcacccgtaatctgtaa

SEQ ID NO: 12386 - DNA, 2217 bp, Artificial Sequence
  source: /note="Description of Artificial Sequence: Synthetic polynucleotide"
atggctgccgatggttatcttccagattggctcgaggacaacctctctgagggcattcgcgagtggtgggcgctgaaacctggagccccgaagcccaaagccaaccagcaaaagcaggacgacggccggggtctggtgcttcctggctacaagtacctcggacccttcaacggactcgacaagggggagcccgtcaacgcggcggacgcggcggccctcgagcacgacaaggcctacgaccagcagctgcaggcgggtgacaatccgtacctgcggtataaccacgccgacgccgagtttcaggagcgtctgcaagaagatacgtcttttgggggcaacctcgggcgagcagtcttccaggccaagaagcgggttctcgaacctctcggtctggttgaggaaggcgctaagacggctcctggaaagaagagaccggtagagccatcaccccagcgttctccagactcctctacgggcatcggcaagaagggccaacagcccgccagaaaaagactcaattttggtcagactggcgactcagagtcagttccagaccctcaacctctcggagaacctccagcagcgccctctggtgtgggacctaatacaatggctgcaggcggtggcgcaccaatggcagacaataacgaaggcgccgacggagtgggtagttcctcgggaaattggcattgcgattccacatggctgggcgacagagtcatcaccaccagcacccgaacctgggccctgcccacctacaacaaccacctctacaagcaaatctccaacgggacatcgggaggagccaccaacgacaacacctacttcggctacagcaccccctgggggtattttgactttaacagattccactgccacttttcaccacgtgactggcagcgactcatcaacaacaactggggattccggcccaagagactcagcttcaagctcttcaacatccaggtcaaggaggtcacgcagaatgaaggcaccaagaccatcgccaataacctcaccagcaccatccaggtgtttacggactcggagtaccagctgccgtacgttctcggctctgcccaccagggctgcctgcctccgttcccggcggacgtgttcacgattccccagtacggctacctaacactcaacaacggtagtcaggccgtgggacgctcctccttctactgcctggaatactttccttcgcagatgctgagaaccggcaacaacttccagtttacttacaccttcgaggacgtgcctttccacagcagctacgcccacagccagagcttggaccggctgatgaatcctctgattgaccagtacctgtactacttgtctcggattcaaacaacaggaggcacggcaaatacgcaggctctgggcttcagccaaggtgggcctaatacaatggccaatcaggcaaagaactggctgccaggaccctgttaccgccaacaacgcgtctcaacgacaaccgggcaaaacaacaatagcaactttgcctggactgctgggaccaaataccatctgaatggaagaaattcattggctaatcctggcatcgctatggcaacacacaaagacgacgaggagcgtttttttcccagtaacgggatcctgatttttggcaaacaaaatgctgccagagacaatgcggattacagcgatgtcatgcccaccagcgaggaagaaatcaaaaccactaaccctgtggccacagaggaatacggtatcgtggcagataacttgcagcagcaaaacacggctcctcaaattggaactgtcaacagccagggggccttacccggtatggtctggcagaaccgggacgtgtacctgcagggtcccatctgggccaagattcctcacacggacggcaacttccacccgtctccgctgatgggcggctttggcctgaaacatcctccgcctcagatcctgatcaagaacacgcctgtacctgcggatcctccgaccaccttcaaccagtcaaagctgaactctttcatcacgcaatacagcaccggacaggtcagcgtggaaattgaatgggagctgcagaaggaaaacagcaagcgctggaaccccgagatccagtacacctccaactactacaaatctacaagtgtggactttgctgttaatacagaaggcgtgtactctgaaccccgccccattggcacccgttacctcacccgtaatctgtaa

SEQ ID NO: 12387 - DNA, 2217 bp, Artificial Sequence
  source: /note="Description of Artificial Sequence: Synthetic polynucleotide"
atggctgccgatggttatcttccagattggctcgaggacaacctctctgagggcattcgcgagtggtgggcgctgaaacctggagccccgaagcccaaagccaaccagcaaaagcaggacgacggccggggtctggtgcttcctggctacaagtacctcggacccttcaacggactcgacaagggggagcccgtcaacgcggcggacgcggcggccctcgagcacgacaaggcctacgaccagcagctgcaggcgggtgacaatccgtacctgcggtataaccacgccgacgccgagtttcaggagcgtctgcaagaagatacgtcttttgggggcaacctcgggcgagcagtcttccaggccaagaagcgggttctcgaacctctcggtctggttgaggaaggcgctaagacggctcctggaaagaagagaccggtagagccatcaccccagcgttctccagactcctctacgggcatcggcaagaagggccaacagcccgccagaaaaagactcaattttggtcagactggcgactcagagtcagttccagaccctcaacctctcggagaacctccagcagcgccctctggtgtgggacctaatacaatggctgcaggcggtggcgcaccaatggcagacaataacgaaggcgccgacggagtgggtagttcctcgggaaattggcattgcgattccacatggctgggcgacagagtcatcaccaccagcacccgaacctgggccctgcccacctacaacaaccacctctacaagcaaatctccaacgggacatcgggaggagccaccaacgacaacacctacttcggctacagcaccccctgggggtattttgactttaacagattccactgccacttttcaccacgtgactggcagcgactcatcaacaacaactggggattccggcccaagagactcagcttcaagctcttcaacatccaggtcaaggaggtcacgcagaatgaaggcaccaagaccatcgccaataacctcaccagcaccatccaggtgtttacggactcggagtaccagctgccgtacgttctcggctctgcccaccagggctgcctgcctccgttcccggcggacgtgttcacgattccccagtacggctacctaacactcaacaacggtagtcaggccgtgggacgctcctccttctactgcctggaatactttccttcgcagatgctgagaaccggcaacaacttccagtttacttacaccttcgaggacgtgcctttccacagcagctacgcccacagccagagcttggaccggctgatgaatcctctgattgaccagtacctgtactacttgtctcggattcaaacaacaggaggcacggcaaatacgcagactctgggcttcagccaaggtgggcctaatacaatggccaatcaggcaaagaactggctgccaggaccctgttaccgccaacaacgcgtctcaacgacaaccgggcaaaacaacaatagcaactttgcctggactgctgggaccaaataccatctgaatggaagaaattcattggctaatcctggcatcgctatggcaacacacaaagacgacgaggagcgtttttttcccagtaacgggatcctgatttttggcaaacaaaatgctgccagagacaatgcggattacagcgatgtcatgcccaccagcgaggaagaaatcaaaaccactaaccctgtggccacagagggatacggtatcgtggcagataacttgcagcagcaaaacacggctcctcaaattggaactgtcaacagccagggggccttacccggtatggtctggcagaaccgggacgtgtacctgcagggtcccatctgggccaagattcctcacacggacggcaacttccacccgtctccgctgatgggcggctttggcctgaaacatcctccgcctcagatcctgatcaagaacacgcctgtacctgcggatcctccgaccaccttcaaccagtcaaagctgaactctttcatcacgcaatacagcaccggacaggtcagcgtggaaattgaatgggagctgcagaaggaaaacagcaagcgctggaaccccgagatccagtacacctccaactactacaaatctacaagtgtggactttgctgttaatacagaaggcgtgtactctgaaccccgccccattggcacccgttacctcacccgtaatctgtaa

SEQ ID NO: 12388 - DNA, 2217 bp, Artificial Sequence
  source: /note="Description of Artificial Sequence: Synthetic polynucleotide"
atggctgccgatggttatcttccagattggctcgaggacaacctctctgagggcattcgcgagtggtgggcgctgaaacctggagccccgaagcccaaagccaaccagcaaaagcaggacgacggccggggtctggtgcttcctggctacaagtacctcggacccttcaacggactcgacaagggggagcccgtcaacgcggcggacgcggcggccctcgagcacgacaaggcctacgaccagcagctgcaggcgggtgacaatccgtacctgcggtataaccacgccgacgccgagtttcaggagcgtctgcaagaagatacgtcttttgggggcaacctcgggcgagcagtcttccaggccaagaagcgggttctcgaacctctcggtctggttgaggaaggcgctaagacggctcctggaaagaagagaccggtagagccatcaccccagcgttctccagactcctctacgggcatcggcaagaagggccaacagcccgccagaaaaagactcaattttggtcagactggcgactcagagtcagttccagaccctcaacctctcggagaacctccagcagcgccctctggtgtgggacctaatacaatggctgcaggcggtggcgcaccaatggcagacaataacgaaggcgccgacggagtgggtagttcctcgggaaattggcattgcgattccacatggctgggcgacagagtcatcaccaccagcacccgaacctgggccctgcccacctacaacaaccacctctacaagcaaatctccaacgggacatcgggaggagccaccaacgacaacacctacttcggctacagcaccccctgggggtattttgactttaacagattccactgccacttttcaccacgtgactggcagcgactcatcaacaacaactggggattccggcccaagagactcagcttcaagctcttcaacatccaggtcaaggaggtcacgcagaatgaaggcaccaagaccatcgccaataacctcaccagcaccatccaggtgtttacggactcggagtaccagctgccgtacgttctcggctctgcccaccagggctgcctgcctccgttcccggcggacgtgttcacgattccccagtacggctacctaacactcaacaacggtagtcaggccgtgggacgctcctccttctactgcctggaatactttccttcgcagatgctgagaaccggcaacaacttccagtttacttacaccttcgaggacgtgcctttccacagcagctacgcccacagccagagcttggaccggctgatgaatcctctgattgaccagtacctgtactacttgtctcggattcaaacaacaggaggcacggcaaatacgcagactctgggcttcagccaaggtgggcctaatacaatggccaatcaggcaaagaactggctgccaggaccctgttaccgccaacaacgcgtctcaacgacaaccgggcaaaacaacaatagcaactttgcctggactgctgggaccaaataccatctgaatggaagaaattcattggctaatcctggcatcgctatggcaacacgcaaagacgacgaggagcgtttttttcccagtaacgggatcctgatttttggcaaacaaaatgctgccagagacaatgcggattacagcgatgtcatgcccaccagcgaggaagaaatcaaaaccactaaccctgtggccacagaggaatacggtatcgtggcagataacttgcagcagcaaaacacggctcctcaaattggaactgtcaacagccagggggccttacccggtatggtctggcagaaccgggacgtgtacctgcagggtcccatctgggccaagattcctcacacggacggcaacttccacccgtctccgctgatgggcggctttggcctgaaacatcctccgcctcagatcctgatcaagaacacgcctgtacctgcggatcctccgaccaccttcaaccagtcaaagctgaactctttcatcacgcaatacagcaccggacaggtcagcgtggaaattgaatgggagctgcagaaggaaaacagcaagcgctggaaccccgagatccagtacacctccaactactacaaatctacaagtgtggactttgctgttaatacagaaggcgtgtactctgaaccccgccccattggcacccgttacctcacccgtaatctgtaa

SEQ ID NO: 12389 - DNA, 2217 bp, Artificial Sequence
  source: /note="Description of Artificial Sequence: Synthetic polynucleotide"
atggctgccgatggttatcttccagattggctcgaggacaacctctctgagggcattcgcgagtggtgggcgctgaaacctggagccccgaagcccaaagccaaccagcaaaagcaggacgacggccggggtctggtgcttcctggctacaagtacctcggacccttcaacggactcgacaagggggagcccgtcaacgcggcggacgcggcggccctcgagcacgacaaggcctacgaccagcagctgcaggcgggtgacaatccgtacctgcggtataaccacgccgacgccgagtttcaggagcgtctgcaagaagatacgtcttttgggggcaacctcgggcgagcagtcttccaggccaagaagcgggttctcgaacctctcggtctggttgaggaaggcgctaagacggctcctggaaagaagagaccggtagagccatcaccccagcgttctccagactcctctacgggcatcggcaagaagggccaacagcccgccagaaaaagactcaattttggtcagactggcgactcagagtcagttccagaccctcaacctctcggagaacctccagcagcgccctctggtgtgggacctaatacaatggctgcaggcggtggcgcaccaatggcagacaataacgaaggcgccgacggagtgggtagttcctcgggaaattggcattgcgattccacatggctgggcgacagagtcatcaccaccagcacccgaacctgggccctgcccacctacaacaaccacctctacaagcaaatctccaacgggacatcgggaggagccaccaacgacaacacctacttcggctacagcaccccctgggggtattttgactttaacagattccactgccacttttcaccacgtgactggcagcgactcatcaacaacaactggggattccggcccaagagactcagcttcaagctcttcaacatccaggtcaaggaggtcacgcagaatgaaggcaccaagaccatcgccaataacctcaccagcaccatccaggtgtttacggactcggagtaccagctgccgtacgttctcggctctgcccaccagggctgcctgcctccgttcccggcggacgtgttcacgattccccagtacggctacctaacactcaacaacggtagtcaggccgtgggacgctcctccttctactgcctggaatactttccttcgcagatgctgagaaccggcaacaacttccagtttacttacaccttcgaggacgtgcctttccacagcagctacgcccacagccagagcttggaccggctgatgaatcctctgattgaccagtacctgtactacttgtctcggattcaaacaacaggaggcacggcaaatacgcagactctgggcttcagccaaggtgggcctaatacaatggccaatcaggcaaagaactggctgccaggaccctgttaccgccaacaacgcgtctcaacgacaaccgggcaaaacaacaatagcaactttgcctggactgctgggaccaaataccatctgaatggaagaaattcattggctaatcctggcatcgctatggcaacacacaaagacgacgaggagcgtttttttcccagtaacgggatcctgatttttggcaaacaaaatgctgccagagacaatgcggattacagcgatgtcatgcccaccagcgaggaagaaatcaaaaccactaaccctgtggccacagaggaatacggtatcgtggcagataacttgcagcagcaaaacacggctcctcaaattggaactgtcaacagccagggggccttacccggtatggtctggcagaaccgggacgtgtacctgcagggtcccatctgggccaagattcctcacacggacggcaacttccacccgtctccgctgatgggcggctttggcctgaaacatcctccgcctcagatcctgatcaagaacacgcctgtacctgcggatcctccgaccaccttcaaccagtcaaagccgaactctttcatcacgcaatacagcaccggacaggtcagcgtggaaattgaatgggagctgcagaaggaaaacagcaagcgctggaaccccgagatccagtacacctccaactactacaaatctacaagtgtggactttgctgttaatacagaaggcgtgtactctgaaccccgccccattggcacccgttacctcacccgtaatctgtaa

SEQ ID NO: 12390 - DNA, 2217 bp, Artificial Sequence
  source: /note="Description of Artificial Sequence: Synthetic polynucleotide"
atggctgccgatggttatcttccagattggctcgaggacaacctctctgagggcattcgcgagtggtgggcgctgaaacctggagccccgaagcccaaagccaaccagcaaaagcaggacgacggccggggtctggtgcttcctggctacaagtacctcggacccttcaacggactcgacaagggggagcccgtcaacgcggcggacgcggcggccctcgagcacgacaaggcctacgaccagcagctgcaggcgggtgacaatccgtacctgcggtataaccacgccgacgccgagtttcaggagcgtctgcaagaagatacgtcttttgggggcaacctcgggcgagcagtcttccaggccaagaagcgggttctcgaacctctcggtctggttgaggaaggcgctaagacggctcctggaaagaagagaccggtagagccatcaccccagcgttctccagactcctctacgggcatcggcaagaagggccaacagcccgccagaaaaagactcaattttggtcagactggcgactcagagtcagttccagaccctcaacctctcggagaacctccagcagcgccctctggtgtgggacctaatacaatggctgcaggcggtggcgcaccaatggcagacaataacgaaggcgccgacggagtgggtagttcctcgggaaattggcattgcgattccacatggctgggcgacagagtcatcaccaccagcacccgaacctgggccctgcccacctacaacaaccacctctacaagcaaatctccaacgggacatcgggaggagccaccaacgacaacacctacttcggctacagcaccccctgggggtattttgactttaacagattccactgccacttttcaccacgtgactggcagcgactcatcaacaacaactggggattccggcccaagagactcagcttcaagctcttcaacatccaggtcaaggaggtcacgcagaatgaaggcaccaagaccatcgccaataacctcaccagcaccatccaggtgtttacggactcggagtaccagctgccgtacgttctcggctctgcccaccagggctgcctgcctccgttcccggcggacgtgttcacgattccccagtacggctacctaacactcaacaacggtagtcaggccgtgggacgctcctccttctactgcctggaatactttccttcgcagatgctgagaaccggcaacaacttccagtttacttacaccttcgaggacgtgcctttccacagcagctacgcccacagccagagcttggaccggctgatgaatcctctgattgaccagtacctgtactacttgtctcggattcaaacaacaggaggcacggcaaatacgcagactctgggcttcagccaaggtgggcctaatacaatggccaatcaggcaaagaactggctgccaggaccctgttaccgccaacaacgcgtctcaacgacaaccgggcaaaacaacaatagcaactttgcctggactgctgggaccaaataccatctgaatggaagaaattcattggctaatcctggcatcgctatggcaacacacaaagacgacgaggagcgttttttttccagtaacgggatcctgatttttggcaaacaaaatgctgccagagacaatgcggattacagcgatgtcatgcccaccagcgaggaagaaatcaaaaccactaaccctgtggccacagaggaatacggtatcgtggcagataacttgcagcagcaaaacacggctcctcaaattggaactgtcaacagccagggggccttacccggtatggtctggcagaaccgggacgtgtacctgcagggtcccatctgggccaagattcctcacacggacggcaacttccacccgtctccgctgatgggcggctttggcctgaaacatcctccgcctcagatcctgatcaagaacacgcctgtacctgcggatcctccgaccaccttcaaccagtcaaagctgaactctttcatcacgcaatacagcaccggacaggtcagcgtggaaattgaatgggagctgcagaaggaaaacagcaagcgctggaaccccgagatccagtacacctccaactactacaaatctacaagtgtggactttgctgttaatacagaaggcgtgtactctgaaccccgccccattggcacccgttacctcacccgtaatctgtaa

SEQ ID NO: 12391 - DNA, 2217 bp, Artificial Sequence
  source: /note="Description of Artificial Sequence: Synthetic polynucleotide"
atggctgccgatggttatcttccagattggctcgaggacaacctctctgagggcattcgcgagtggtgggcgctgaaacctggagccccgaagcccaaagccaaccagcaaaagcaggacgacggccggggtctggtgcttcctggctacaagtacctcggacccttcaacggactcgacaagggggagcccgtcaacgcggcggacgcggcggccctcgagcacgacaaggcctacgaccagcagctgcaggcgggtgacaatccgtacctgcggtataaccacgccgacgccgagtttcaggagcgtctgcaagaagatacgtcttttgggggcaacctcgggcgagcagtcttccaggccaagaagcgggttctcgaacctctcggtctggttgaggaaggcgctaagacggctcctggaaagaagagaccggtagagccatcaccccagcgttctccagactcctctacgggcatcggcaagaagggccaacagcccgccagaaaaagactcaattttggtcagactggcgactcagagtcagttccagaccctcaacctctcggagaacctccagcagcgccctctggtgtgggacctaatacaatggctgcaggcggtggcgcaccaatggcagacaataacgaaggcgccgacggagtgggtagttcctcgggaaattggcattgcgattccacatggctgggcgacagagtcatcaccaccagcacccgaacctgggccctgcccacctacaacaaccacctctacaagcaaatctccaacgggacatcgggaggagccaccaacgacaacacctacttcggctacagcaccccctgggggtattttgactttaacagattccactgccacttttcaccacgtgactggcagcgactcatcaacaacaactggggattccggcccaagagactcagcttcaagctcttcaacatccaggtcaaggaggtcacgcagaatgaaggcaccaagaccatcgccaataacctcaccagcaccatccaggtgtttacggactcggagtaccagctgccgtacgttctcggctctgcccaccagggctgcctgcctccgttcccggcggacgtgttcacgattccccagtacggctacctaacactcaacaacggtagtcaggccgtgggacgctcctccttctactgcctggaatactttccttcgcagatgctgagaaccggcaacaacttccagtttacttacaccttcgaggacgtgcctttccacagcagctacgcccacagccagagcttggaccggctgatgaatcctctgattgaccagtacctgtactacttgtctcggattcaaacaacaggaggcacggcaaatacgcagactctgggcttcagccaaggtgggcctaatacaatggccaatcaggcaaagaactggctgccaggaccctgttaccgccaacaacgcgtctcaacgacaaccgggcaaaacaacaatagcaactttgcctgggctgctgggaccaaataccatctgaatggaagaaattcattggctaatcctggcatcgctatggcaacacacaaagacgacgaggagcgtttttttcccagtaacgggatcctgatttttggcaaacaaaatgctgccagagacaatgcggattacagcgatgtcatgcccaccagcgaggaagaaatcaaaaccactaaccctgtggccacagaggaatacggtatcgtggcagataacttgcagcagcaaaacacggctcctcaaattggaactgtcaacagccagggggccttacccggtatggtctggcagaaccgggacgtgtacctgcagggtcccatctgggccaagattcctcacacggacggcaacttccacccgtctccgctgatgggcggctttggcctgaaacatcctccgcctcagatcctgatcaagaacacgcctgtacctgcggatcctccgaccaccttcaaccagtcaaagctgaaccctttcatcacgcaatacagcaccggacaggtcagcgtggaaattgaatgggagctgcagaaggaaaacagcaagcgctggaaccccgagatccagtacacctccaactactacaaatctacaagtgtggactttgctgttaatacagaaggcgtgtactctgaaccccgccccattggcacccgttacctcacccgtaatctgtaa

SEQ ID NO: 12392 - DNA, 2217 bp, Artificial Sequence
  source: /note="Description of Artificial Sequence: Synthetic polynucleotide"
atggctgccgatggttatcttccagattggctcgaggacaacctctctgagggcattcgcgagtggtgggcgctgaaacctggagccccgaagcccaaagccaaccagcaaaagcaggacgacggccggggtctggtgcttcctggctacaagtacctcggacccttcaacggactcgacaagggggagcccgtcaacgcggcggacgcggcggccctcgagcacgacaaggcctacgaccagcagctgcaggcgggtgacaatccgtacctgcggtataaccacgccgacgccgagtttcaggagcgtctgcaagaagatacgtcttttgggggcaacctcgggcgagcagtcttccaggccaagaagcgggttctcgaacctctcggtctggttgaggaaggcgctaagacggctcctggaaagaagagaccggtagagccatcaccccagcgttctccagactcctctacgggcatcggcaagaagggccaacagcccgccagaaaaagactcaattttggtcagactggcgactcagagtcagttccagaccctcaacctctcggagaacctccagcagcgccctctggtgtgggacctaatacaatggctgcaggcggtggcgcaccaatggcagacaataacgaaggcgccgacggagtgggtagttcctcgggaaattggcattgcgattccacatggctgggcgacagagtcatcaccaccagcacccgaacctgggccctgcccacctacaacaaccacctctacaagcaaatctccaacgggacatcgggaggagccaccaacgacaacacctacttcggctacagcaccccctgggggtattttgactttaacagattccactgccacttttcaccacgtgactggcagcgactcatcaacaacaactggggattccggcccaagagactcagcttcaagctcttcaacatccaggtcaaggaggtcacgcagaatgaaggcaccaagaccatcgccaataaccccaccagcaccatccaggtgtttacggactcggagtaccagctgccgtacgttctcggctctgcccaccagggctgcctgcctccgttcccggcggacgtgttcacgattccccagtacggctacctaacactcaacaacggtagtcaggccgtgggacgctcctccttctactgcctggaatactttccttcgcagatgctgagaaccggcaacaacttccagtttacttacaccttcgaggacgtgcctttccacagcagctacgcccacagccagagcttggaccggctgatgaatcctctgattgaccagtacctgtactacttgtctcggattcaaacaacaggaggcacggcaaatacgcagactctgggcttcagccaaggtgggcctaatacaatggccaatcaggcaaagaactggctgccaggaccctgttaccgccaacaacgcgtctcaacgacaaccgggcaaaacaacaatagcaactttgcctggactgctgggaccaaataccatctgaatggaagaaattcattggctaatcctggcatcgctatggcaacacacaaagacgacgaggagcgtttttttcccagtaacgggatcctgatttttggcaaacaaaatgctgccagagacaatgcggattacagcgatgtcatgcccaccagcgaggaagaaatcaaaaccactaaccctgtggccacagaggaatacggtatcgtggcggataacttgcagcagcaaaacacggctcctcaaattggaactgtcaacagccagggggccttacccggtatggtctggcagaaccgggacgtgtacctgcagggtcccatctgggccaagattcctcacacggacggcaacttccacccgtctccgctgatgggcggctttggcctgaaacatcctccgcctcagatcctgatcaagaacacgcctgtacctgcggatcctccgaccaccttcaaccagtcaaagctgaactctttcatcacgcaatacagcaccggacaggtcagcgtggaaattgaatgggagctgcagaaggaaaacagcaagcgctggaaccccgagatccagtacacctccaactactacaaatctacaagtgtggactttgctgttaatacagaaggcgtgtactctgaaccccgccccattggcacccgttacctcacccgtaatctgtaa

SEQ ID NO: 12393 - DNA, 2217 bp, Artificial Sequence
  source: /note="Description of Artificial Sequence: Synthetic polynucleotide"
atggctgccgatggttatcttccagattggctcgaggacaacctctctgagggcattcgcgagtggtgggcgctgaaacctggagccccgaagcccaaagccaaccagcaaaagcaggacgacggccggggtctggtgcttcctggctacaagtacctcggacccttcaacggactcgacaagggggagcccgtcaacgcggcggacgcggcggccctcgagcacgacaaggcctacgaccagcagctgcaggcgggtgacaatccgtacctgcggtataaccacgccgacgccgagtttcaggagcgtctgcaagaagatacgtcttttgggggcaacctcgggcgagcagtcttccaggccaagaagcgggttctcgaacctctcggtctggttgaggaaggcgctaagacggctcctggaaagaagagaccggtagagccatcaccccagcgttctccagactcctctacgggcatcggcaagaagggccaacagcccgccagaaaaagactcaattttggtcagactggcgactcagagtcagttccagaccctcaacctctcggagaacctccagcagcgccctctggtgtgggacctaatacaatggctgcaggcggtggcgcaccaatggcagacaataacgaaggcgccgacggagtgggtagttcctcgggaaattggcattgcgattccacatggctgggcgacagagtcatcaccaccagcacccgaacctgggccctgcccacctacaacaaccacctctacaagcaaatctccaacgggacatcgggaggagccaccaacgacaacacctacttcggctacagcaccccctgggggtattttgactttaacagattccactgccgcttttcaccacgtgactggcagcgactcatcaacaacaactggggattccggcccaagagactcagcttcaagctcttcaacatccaggtcaaggaggtcacgcagaatgaaggcaccaagaccatcgccaataacctcaccagcaccatccaggtgtttacggactcggagtaccagctgccgtacgttctcggctctgcccaccagggctgcctgcctccgttcccggcggacgtgttcacgattccccagtacggctacctaacactcaacaacggtagtcaggccgtgggacgctcctccttctactgcctggaatactttccttcgcagatgctgagaaccggcaacaacttccagtttacttacaccttcgaggacgtgcctttccacagcagctacgcccacagccagagcttggaccggctgatgaatcctctgattgaccagtacctgtactacttgtctcggattcaaacaacaggaggcacggcaaatacgcagactctgggcttcagccaaggtgggcctaatacaatggccaatcaggcaaagaactggctgccaggaccctgttaccgccaacaacgcgtctcaacgacaaccgggcaaaacaacaatagcaactttgcctggactgctgggaccaaataccatctgaatggaagaaattcattggctaatcctggcatcgctatggcaacacacaaagacgacgaggagcgtttttttcccagtaacgggatcctgatttttggcaaacaaaatgctgccagagacaatgcggattacagcgatgtcatgcccaccagcgaggaagaaatcaaaaccactaaccctgtggccacagaggaatacggtatcgtggcagataacttgcagcagcaaaacacggctcctcaaattggaactgtcaacagccagggggccttacccggtatggtctggcagaaccgggacgtgtacctgcagggtcccatctgggccaagattcctcacacggacggcaacttccacccgtctccgctgatgggcggctttggcctgaaacatcctccgcctcagatcctgatcaagaacacgcctgtacctgcggatcctccgaccaccttcaaccagtcaaagctgaactctttcatcacgcaatacagcaccggacaggtcagcgtggaaattgaatgggagctgcagaaggaaaacagcaagcgctggaaccccgagatccagtacacctccaactactacaaatctacaagtgtggactttgctgttaatacagaaggcgtgtactctgaaccccgccccattggcacccgttacctcacccgtaatctgtaa

SEQ ID NO: 12394 - DNA, 2217 bp, Artificial Sequence
  source: /note="Description of Artificial Sequence: Synthetic polynucleotide"
atggctgccgatggttatcttccagattggctcgaggacaacctctctgagggcattcgcgagtggtgggcgctgaaacctggagccccgaagcccaaagccaaccagcaaaagcaggacgacggccggggtctggtgcttcctggctacaagtacctcggacccttcaacggactcgacaagggggagcccgtcaacgcggcggacgcggcggccctcgagcacgacaaggcctacgaccagcagctgcaggcgggtgacaatccgtacctgcggtataaccacgccgacgccgagtttcaggagcgtctgcaagaagatacgtcttttgggggcaacctcgggcgagcagtcttccaggccaagaagcgggttctcgaacctctcggtctggttgaggaaggcgctaagacggctcctggaaagaagagaccggtagagccatcaccccagcgttctccagactcctctacgggcatcggcaagaagggccaacagcccgccagaaaaagactcaattttggtcagactggcgactcagagtcagttccagaccctcaacctctcggagaacctccagcagcgccctctggtgtgggacctaatacaatggctgcaggcggtggcgcaccaatggcagacaataacgaaggcgccgacggagtgggtagttcctcgggaaattggcattgcgattccacatggctgggcgacagagtcatcaccaccagcacccgaacctgggccctgcccacctacaacaaccacctctacaagcaaatctccaacgggacatcgggaggagccaccaacgacaacacctacttcggctacagcaccccctgggggtattttgactttaacagattccactgccacttttcaccacgtgactggcagcgactcatcaacaacaactggggattccggcccaagagactcagcttcaagctcttcaacatccaggtcaaggaggtcacgcagaatgaaggcaccaagaccatcgccaataacctcaccagcaccatccaggtgtttacggactcggagtaccagctgccgtacgttctcggctctgcccaccagggctgcctgcctccgttcccggcggacgtgttcacgattccccagtacggctacctaacactcaacaacggtagtcaggccgtgggacgctcctccttctactgcctggaatactttccttcgcagatgctgagaaccggcaacaacttccagtttacttacaccttcgaggacgtgcctttccacagcagctacgcccacagccagagcttggaccggctgatgaatcctctgattgaccagtacctgtactacttgtctcggattcaaacaacaggaggcacggcaaatacgcagactctgggcttcagccaaggtgggcctaatacaatggccaatcaggcaaagaactggctgccaggaccctgttaccgccaacaacgcgtctcaacgacaaccgggcaaaacaacaatagcaactttgcctggactgctgggaccaaataccatctgaatggaagaaattcattggctaatcctggcatcgctatggcaacacacaaagacgacgaggagcgtttttttcccagtaacgggatcctgatttttggcaaacaaaatgctgccagagacaatgcggattacagcgatgtcatgcccaccagcgaggaagaaatcaaaaccactaaccctgtggccacagaggaatacggtatcgtggcagataacttgcagcagcaaaacgcggctcctcaaattggaactgtcaacagccagggggccttacccggtatggtctggcagaaccgggacgtgtacctgcagggtcccatctgggccaagattcctcacacggacggcaacttccacccgtctccgctgatgggcggctttggcctgaaacatcctccgcctcagatcctgatcaagaacacgcctgtacctgcggatcctccgaccaccttcaaccagtcaaagctgaactctttcatcacgcaatacagcaccggacaggtcagcgtggaaattgaatgggagctgcagaaggaaaacagcaagcgctggaaccccgagatccagtacacctccaactactacaaatctacaagtgtggactttgctgttaatacagaaggcgtgtactctgaaccccgccccattggcacccgttacctcacccgtaatctgtaa

SEQ ID NO: 12395 - DNA, 2217 bp, Artificial Sequence
  source: /note="Description of Artificial Sequence: Synthetic polynucleotide"
atggctgccgatggttatcttccagattggctcgaggacaacctctctgagggcattcgcgagtggtgggcgctgaaacctggagccccgaagcccaaagccaaccagcaaaagcaggacgacggccggggtctggtgcttcctggctacaagtacctcggacccttcaacggactcgacaagggggagcccgtcaacgcggcggacgcggcggccctcgagcacgacaaggcctacgaccagcagctgcaggcgggtgacaatccgtacctgcggtataaccacgccgacgccgagtttcaggagcgtctgcaagaagatacgtcttttgggggcaacctcgggcgagcagtcttccaggccaagaagcgggttctcgaacctctcggtctggttgaggaaggcgctaagacggctcctggaaagaagagaccggtagagccatcaccccagcgttctccagactcctctacgggcatcggcaagaagggccaacagcccgccagaaaaagactcaattttggtcagactggcgactcagagtcagttccagaccctcaacctctcggagaacctccagcagcgccctctggtgtgggacctaatacaatggctgcaggcggtggcgcaccaatggcagacaataacgaaggcgccgacggagtgggtagttcctcgggaaattggcattgcgattccacatggctgggcgacagagtcatcaccaccagcacccgaacctgggccctgcccacctacaacaaccacctctacaagcaaatctccaacgggacatcgggaggagccaccaacgacaacacctacttcggctacagcaccccctgggggtattttgactttaacagattccactgccacttttcaccacgtgactggcagcgactcatcaacaacaactggggattccggcccaagagactcagcttcaagctcttcaacatccaggtcaaggaggtcacgcagaatgaaggcaccaagaccatcgccaatagcctcaccagcaccatccaggtgtttacggactcggagtaccagctgccgtacgttctcggctctgcccaccagggctgcctgcctccgttcccggcggacgtgttcacgattccccagtacggctacctaacactcaacaacggtagtcaggccgtgggacgctcctccttctactgcctggaatactttccttcgcagatgctgagaaccggcaacaacttccagtttacttacaccttcgaggacgtgcctttccacagcagctacgcccacagccagagcttggaccggctgatgaatcctctgattgaccagtacctgtactacttgtctcggattcaaacaacaggaggcacggcaaatacgcagactctgggcttcagccaaggtgggcctaatacaatggccaatcaggcaaagaactggctgccaggaccctgttaccgccaacaacgcgtctcaacgacaaccgggcaaaacaacaatagcaactttgcctggactgctgggaccaaataccatctgaatggaagaaattcattggctaatcctggcatcgctatggcaacacacaaagacgacgaggagcgtttttttcccagtaacgggatcctgatttttggcaaacaaaatgctgccagagacaatgcggattacagcgatgtcatgcccaccagcgaggaagaaatcaaaaccactaaccctgtggccacagaggaatacggtatcgtggcagataacttgcagcagcaaaacacggctcctcaaattggaactgtcaacagccagggggccttacccggtatggtctggcagaaccgggacgtgtacctgcagggtcccatctgggccaagattcctcacacggacggcaacttccacccgtctccgctgatgggcggctttggcctgaaacatcctccgcctcagatcctgatcaagaacacgcctgtacctgcggatcctccgaccaccttcaaccagtcaaagctgaactctttcatcacgcaatacagcaccggacaggtcagcgtggaaattgaatgggagctgcagaaggaaaacagcaagcgctggaaccccgagatccagtacacctccaactactacaaatctgcaagtgtggactttgctgttaatacagaaggcgtgtactctgaaccccgccccattggcacccgttacctcacccgtaatctgtaa

SEQ ID NO: 12396 - DNA, 2217 bp, Artificial Sequence
  source: /note="Description of Artificial Sequence: Synthetic polynucleotide"
atggctgccgatggttatcttccagattggctcgaggacaacctctctgagggcattcgcgagtggtgggcgctgaaacctggagccccgaagcccaaagccaaccagcaaaagcaggacgacggccggggtctggtgcttcctggctacaagtacctcggacccttcaacggactcgacaagggggagcccgtcaacgcggcggacgcggcggccctcgagcacgacaaggcctacgaccagcagctgcaggcgggtgacaatccgtacctgcggtataaccacgccgacgccgagtttcaggagcgtctgcaagaagatacgtcttttgggggcaacctcgggcgagcagtcttccaggccaagaagcgggttctcgaacctctcggtctggttgaggaaggcgctaagacggctcctggaaagaagagaccggtagagccatcaccccagcgttctccagactcctctacgggcatcggcaagaagggccaacagcccgccagaaaaagactcaattttggtcagactggcgactcagagtcagttccagaccctcaacctctcggagaacctccagcagcgccctctggtgtgggacctaatacaatggctgcaggcggtggcgcaccaatggcagacaataacgaaggcgccgacggagtgggtagttcctcgggaaattggcattgcgattccacatggctgggcgacagagtcatcaccaccagcacccgaacctgggccctgcccacctacaacaaccacctctacaagcaaatctccaacgggacatcgggaggagccaccaacgacaacacctacttcggctacagcaccccctgggggtattttgactttaacagattccactgccacttttcaccacgtgactggcagcgactcatcaacaacaactggggattccggcccaagagactcagcttcaagctcttcaacatccaggtcaaggaggtcacgcagaatgaaggcaccaagaccatcgccaataacctcaccagcaccatccaggtgtttacggactcggagtaccagctgccgtacgttctcggctctgcccaccagggctgcctgcctccgttcccggcggacgtgttcacgattccccagtacggctacctaacactcaacaacggtagtcaggccgtgggacgctcctccttctactgcctggaatactttccttcgcagatgctgagaaccggcaacaacttccagtttacttacaccttcgaggacgtgcctttccacagcagctacgcccacagccagagcttggaccggctgatgaatcctctgattgaccagtacctgtactacttgtctcggattcaaacaacaggaggcacggcaaatacgcagactctgggcttcagccaaggtgggcctaatacaatggccaatcaggcaaagaactggctgccaggaccctgttaccgccaacaacgcgtctcaacgacaaccgggcaaaacaacaatagcaactttgcctggactgctgggaccaaataccatctgaatggaggaaattcattggctaatcctggcatcgctatggcaacacacaaagacgacgaggagcgtttttttcccagtaacgggatcctgatttttggcaaacaaaatgctgccagagacaatgcggattacagcgatgtcatgcccaccagcgaggaagaaatcaaaaccactaaccctgtggccacagaggaatacggtatcgtggcagataacttgcagcagcaaaacacggctcctcaaattggaactgtcaacagccagggggccttacccggtatggtctggcagaaccgggacgtgtacctgcagggtcccatctgggccaagattcctcacacggacggcaacttccacccgtctccgctgatgggcggctttggcctgaaacatcctccgcctcagatcctgatcaagaacacgcctgtacctgcggatcctccgaccaccttcaaccagtcaaagctgaactctttcatcacgcaatacagcaccggacaggtcagcgtggaaattgaatgggagctgcagaaggaaaacagcaagcgctggaaccccgagatccagtacacctccaactactacaaatctacaagtgtggactttgctgttaatacagaaggcgtgtactctgaaccccgccccattggcacccgttacctcacccgtaatctgtaa

SEQ ID NO: 12397 - DNA, 2217 bp, Artificial Sequence
  source: /note="Description of Artificial Sequence: Synthetic polynucleotide"
atggctgccgatggttatcttccagattggctcgaggacaacctctctgagggcattcgcgagtggtgggcgctgaaacctggagccccgaagcccaaagccaaccagcaaaagcaggacgacggccggggtctggtgcttcctggctacaagtacctcggacccttcaacggactcgacaagggggagcccgtcaacgcggcggacgcggcggccctcgagcacgacaaggcctacgaccagcagctgcaggcgggtgacaatccgtacctgcggtataaccacgccgacgccgagtttcaggagcgtctgcaagaagatacgtcttttgggggcaacctcgggcgagcagtcttccaggccaagaagcgggttctcgaacctctcggtctggttgaggaaggcgctaagacggctcctggaaagaagagaccggtagagccatcaccccagcgttctccagactcctctacgggcatcggcaagaagggccaacagcccgccagaaaaagactcaattttggtcagactggcgactcagagtcagttccagaccctcaacctctcggagaacctccagcagcgccctctggtgtgggacctaatacaatggctgcaggcggtggcgcaccaatggcagacaataacgaaggcgccgacggagtgggtagttcctcgggaaattggcattgcgattccacatggctgggcgacagagtcatcaccaccagcacccgaacctgggccctgcccacctacaacaaccacctctacaagcaaatctccaacgggacatcgggaggagccaccaacgacaacacctacttcggctacagcaccccctgggggtattttgactttaacagattccactgccacttttcaccacgtgactggcagcgactcatcaacaacaactggggattccggcccaagagactcagcttcaagctcttcaacatccaggtcaaggaggtcacgcagaatgaaggcaccaagaccatcgccaataacctcaccagcaccatccaggtgtttacggactcggagtaccagctgccgtacgttctcggctctgcccaccagggctgcctgcctccgttcccggcggacgtgttcacgattccccagtacggctacctaacactcaacaacggtagtcaggccgtgggacgctcctccttctactgcctggaatactttccttcgcagatgctgagaaccggcaacaacttccagtttacttacaccttcgaggacgtgcctttccacagcagctacgcccacagccagagcttggaccggctgatgaatcctctgattgaccagtacctgtactacttgtctcggattcaaacaacaggaggcacggcaaatacgcagactctgggcttcagccaaggtgggcctaatacaatggccaatcaggcaaagaactggctgccaggaccctgttaccgccaacaacgcgtctcaacgacaaccgggcaaaacaacaatagcaactttgcctggactgctgggaccaaataccatctgaatggaagaaattcattggctaatcctggcatcgctatggcaacacacaaagacgacgaggagcgtttttttcccagtaacgggatcctgatttttggcaaacaaaatgctgccagagacaatgcggattacagcgatgtcatgcccaccagcgaggaagaaatcaaaaccactaaccctgtggccacagaggaatacggtatcgtggcagataacttgcagcagcaaaacacggctcctcaaattggaactgtcaacagccagggggccttacccggtatggtctggcagaaccgggacgtgtacctgcagggtcccatctgggccaagattcctcacacggacggcaacttccacccgtctccgctgatgggcggctttggcctgaaacatcctccgcctcagatcctgatcaagaacacgcctgtacctgcggatcctccgaccaccttcaaccagtcaaggctgaactctttcatcacgcaatacagcaccggacaggtcagcgtggaaattgaatgggagctgcagaaggaaaacagcaagcgctggaaccccgagatccagtacacctccaactactacaaatctacaagtgtggactttgctgttaatacagaaggcgtgtactctgaaccccgccccattggcacccgttacctcacccgtaatctgtaa

SEQ ID NO: 12398 - DNA, 2217 bp, Artificial Sequence
  source: /note="Description of Artificial Sequence: Synthetic polynucleotide"
atggctgccgatggttatcttccagattggctcgaggacaacctctctgagggcattcgcgagtggtgggcgctgaaacctggagccccgaagcccaaagccaaccagcaaaagcaggacgacggccggggtctggtgcttcctggctacaagtacctcggacccttcaacggactcgacaagggggagcccgtcaacgcggcggacgcggcggccctcgagcacgacaaggcctacgaccagcagctgcaggcgggtgacaatccgtacctgcggtataaccacgccgacgccgagtttcaggagcgtctgcaagaagatacgtcttttgggggcaacctcgggcgagcagtcttccaggccaagaagcgggttctcgaacctctcggtctggttgaggaaggcgctaagacggctcctggaaagaagagaccggtagagccatcaccccagcgttctccagactcctctacgggcatcggcaagaagggccaacagcccgccagaaaaagactcaattttggtcagactggcgactcagagtcagttccagaccctcaacctctcggagaacctccagcagcgccctctggtgtgggacctaatacaatggctgcaggcggtggcgcaccaatggcagacaataacgaaggcgccgacggagtgggtagttcctcgggaaattggcattgcgattccacatggctgggcgacagagtcatcaccaccagcacccgaacctgggccctgcccacctacaacaaccacctctacaagcaaatctccaacgggacatcgggaggagccgccaacgacaacacctacttcggctacagcaccccctgggggtattttgactttaacagattccactgccacttttcaccacgtgactggcagcgactcatcaacaacaactggggattccggcccaagagactcagcttcaagctcttcaacatccaggtcaaggaggtcacgcagaatgaaggcaccaagaccatcgccaataacctcaccagcaccatccaggtgtttacggactcggagtaccagctgccgtacgttctcggctctgcccaccagggctgcctgcctccgttcccggcggacgtgttcacgattccccagtacggctacctaacactcaacaacggtagtcaggccgtgggacgctcctccttctactgcctggaatactttccttcgcagatgctgagaaccggcaacaacttccagtttacttacaccttcgaggacgtgcctttccacagcagctacgcccacagccagagcttggaccggctgatgaatcctctgattgaccagtacctgtactacttgtctcggattcaaacaacaggaggcacggcaaatacgcagactctgggcttcagccaaggtgggcctaatacaatggccaatcaggcaaagaactggctgccaggaccctgttaccgccaacaacgcgtctcaacgacaaccgggcaaaacaacaatagcaactttgcctggactgctgggaccaaataccatctgaatggaagaaattcattggctaatcctggcatcgctatggcaacacacaaagacgacgaggagcgtttttttcccagtaacgggatcctgatttttggcaaacaaaatgctgccagagacaatgcggattacagcgatgtcatgcccaccagcgaggaagaaatcaaaaccactaaccctgtggccacagaggaatacggtatcgtggcagataacttgcagcagcaaaacacggctcctcaaattggaactgtcaacagccagggggccttacccggtatggtctggcagaaccgggacgtgtacctgcagggtcccatctgggccaagattcctcacacggacggcaacttccacccgtctccgctgatgggcggctttggcctgaaacatcctccgcctcagatcctgatcaagaacacgcctgtacctgcggatcctccgaccaccttcaaccagtcaaagctgaactctttcatcacgcaatacagcaccggacaggtcagcgtggaaattgaatgggagctgcagaaggaaaacagcaagcgctggaaccccgagatccagtacacctccaactactacaaatctacaagtgtggactttgctgttaatacagaaggcgtgtactctgaaccccgccccattggcacccgttacctcacccgtaatctgtaa

SEQ ID NO: 12399 - DNA, 2217 bp, Artificial Sequence
  source: /note="Description of Artificial Sequence: Synthetic polynucleotide"
atggctgccgatggttatcttccagattggctcgaggacaacctctctgagggcattcgcgagtggtgggcgctgaaacctggagccccgaagcccaaagccaaccagcaaaagcaggacgacggccggggtctggtgcttcctggctacaagtacctcggacccttcaacggactcgacaagggggagcccgtcaacgcggcggacgcggcggccctcgagcacgacaaggcctacgaccagcagctgcaggcgggtgacaatccgtacctgcggtataaccacgccgacgccgagtttcaggagcgtctgcaagaagatacgtcttttgggggcaacctcgggcgagcagtcttccaggccaagaagcgggttctcgaacctctcggtctggttgaggaaggcgctaagacggctcctggaaagaagagaccggtagagccatcaccccagcgttctccagactcctctacgggcatcggcaagaagggccaacagcccgccagaaaaagactcaattttggtcagactggcgactcagagtcagttccagaccctcaacctctcggagaacctccagcagcgccctctggtgtgggacctaatacaatggctgcaggcggtggcgcaccaatggcaggcaataacgaaggcgccgacggagtgggtagttcctcgggaaattggcattgcgattccacatggctgggcgacagagtcatcaccaccagcacccgaacctgggccctgcccacctacaacaaccacctctacaagcaaatctccaacgggacatcgggaggagccaccaacgacaacacctacttcggctacagcaccccctgggggtattttgactttaacagattccactgccacttttcaccacgtgactggcagcgactcatcaacaacaactggggattccggcccaagagactcagcttcaagctcttcaacatccaggtcaaggaggtcacgcagaatgaaggcaccaagaccatcgccaataacctcaccagcaccatccaggtgtttacggactcggagtaccagctgccgtacgttctcggctctgcccaccagggctgcctgcctccgttcccggcggacgtgttcacgattccccagtacggctacctaacactcaacaacggtagtcaggccgtgggacgctcctccttctactgcctggaatactttccttcgcagatgctgagaaccggcaacaacttccagtttacttacaccttcgaggacgtgcctttccacagcagctacgcccacagccagagcttggaccggctgatgaatcctctgattgaccagtacctgtactacttgtctcggattcaaacaacaggaggcacggcaaatacgcagactctgggcttcagccaaggtgggcctaatacaatggccaatcaggcaaagaactggctgccaggaccctgttaccgccaacaacgcgtctcaacgacaaccgggcaaaacaacaatagcaactttgcctggactgctgggaccaaataccatctgaatggaagaaattcattggctaatcctggcatcgctatggcaacacacaaagacgacgaggagcgtttttttcccagtaacgggatcctgatttttggcaaacaaaatgctgccagagacaatgcggattacagcgatgtcatgcccaccagcgaggaagaaatcaaaaccactaaccctgtggccacagaggaatacggtatcgtggcagataacttgcagcagcaaaacacggctcctcaaattggaactgtcaacagccagggggccttacccggtatggtctggcagaaccgggacgtgtacctgcagggtcccatctgggccaagattcctcacacggacggcaacttccacccgtctccgctgatgggcggctttggcctgaaacatcctccgcctcagatcctgatcaagaacacgcctgtacctgcggatcctccgaccaccttcaaccagtcaaagctgaactctttcatcacgcaatacagcaccggacaggtcagcgtggaaattgaatgggagctgcagaaggaaaacagcaagcgctggaaccccgagatccagtacacctccaactactacaaatctacaagtgtggactttgctgttaatacagaaggcgtgtactctgaaccccgccccattggcacccgttacctcacccgtaatctgtaa

SEQ ID NO: 12400 - DNA, 2217 bp, Artificial Sequence
  source: /note="Description of Artificial Sequence: Synthetic polynucleotide"
atggctgccgatggttatcttccagattggctcgaggacaacctctctgagggcattcgcgagtggtgggcgctgaaacctggagccccgaagcccaaagccaaccagcaaaagcaggacgacggccggggtctggtgcttcctggctacaagtacctcggacccttcaacggactcgacaagggggagcccgtcaacgcggcggacgcggcggccctcgagcacgacaaggcctacgaccagcagctgcaggcgggtgacaatccgtacctgcggtataaccacgccgacgccgagtttcaggagcgtctgcaagaagatacgtcttttgggggcaacctcgggcgagcagtcttccaggccaagaagcgggttctcgaacctctcggtctggttgaggaaggcgctaagacggctcctggaaagaagagaccggtagagccatcaccccagcgttctccagactcctctacgggcatcggcaggaagggccaacagcccgccagaaaaagactcaattttggtcagactggcgactcagagtcagttccagaccctcaacctctcggagaacctccagcagcgccctctggtgtgggacctaatacaatggctgcaggcggtggcgcaccaatggcagacaataacgaaggcgccgacggagtgggtagttcctcgggaaattggcattgcgattccacatggctgggcgacagagtcatcaccaccagcacccgaacctgggccctgcccacctacaacaaccacctctacaagcaaatctccaacgggacatcgggaggagccaccaacgacaacacctacttcggctacagcaccccctgggggtattttgactttaacagattccactgccacttttcaccacgtgactggcagcgactcatcaacaacaactggggattccggcccaagagactcagcttcaagctcttcaacatccaggtcaaggaggtcacgcagaatgaaggcaccaagaccatcgccaataacctcaccagcaccatccaggtgtttacggactcggagtaccagctgccgtacgttctcggctctgcccaccagggctgcctgcctccgttcccggcggacgtgttcacgattccccagtacggctacctaacactcaacaacggtagtcaggccgtgggacgctcctccttctactgcctggaatactttccttcgcagatgctgagaaccggcaacaacttccagtttacttacaccttcgaggacgtgcctttccacagcagctacgcccacagccagagcttggaccggctgatgaatcctctgattgaccagtacctgtactacttgtctcggattcaaacaacaggaggcacggcaaatacgcagactctgggcttcagccaaggtgggcctaatacaatggccaatcaggcaaagaactggctgccaggaccctgttaccgccaacaacgcgtctcaacgacaaccgggcaaaacaacaatagcaactttgcctggactgctgggaccaaataccatctgaatggaagaaattcattggctaatcctggcatcgctatggcaacacacaaagacgacgaggagcgtttttttcccagtaacgggatcctgatttttggcaaacaaaatgctgccagagacaatgcggattacagcgatgtcatgcccaccagcgaggaagaaatcaaaaccactaaccctgtggccacagaggaatacggtatcgtggcagataacttgcagcagcaaaacacggctcctcaaattggaactgtcaacagccagggggccttacccggtatggtctggcagaaccgggacgtgtacctgcagggtcccatctgggccaagattcctcacacggacggcaacttccacccgtctccgctgatgggcggctttggcctgaaacatcctccgcctcagatcctgatcaagaacacgcctgtacctgcggatcctccgaccaccttcaaccagtcaaagctgaactctttcatcacgcaatacagcaccggacaggtcagcgtggaaattgaatgggagctgcagaaggaaaacagcaagcgctggaaccccgagatccagtacacctccaactactacaaatctacaagtgtggactttgctgttaatacagaaggcgtgtactctgaaccccgccccattggcacccgttacctcacccgtaatctgtaa

SEQ ID NO: 12401 - DNA, 2217 bp, Artificial Sequence
  source: /note="Description of Artificial Sequence: Synthetic polynucleotide"
atggctgccgatggttatcttccagattggctcgaggacaacctctctgagggcattcgcgagtggtgggcgctgaaacctggagccccgaagcccaaagccaaccagcaaaagcaggacgacggccggggtctggtgcttcctggctacaagtacctcggacccttcaacggactcgacaagggggagcccgtcaacgcggcggacgcggcggccctcgagcacgacaaggcctacgaccagcagctgcaggcgggtgacaatccgtacctgcggtataaccacgccgacgccgagtttcaggagcgtctgcaagaagatacgtcttttgggggcaacctcgggcgagcagtcttccaggccaagaagcgggttctcgaacctctcggtctggttgaggaaggcgctaagacggctcctggaaagaagagaccggtagagccatcaccccagcgttctccagactcctctacgggcatcggcaagaagggccaacagcccgccagaaaaagactcaattttggtcagactggcgactcagagtcagttccagaccctcaacctctcggagaacctccagcagcgccctctggtgtgggacctaatacaatggctgcaggcggtggcgcaccaatggcagacaataacgaaggcgccgacggagtgggtagttcctcgggaaattggcattgcgattccacatggctgggcgacagagtcatcaccaccagcacccgaacctgggccctgcccacctacaacaaccacctctacaagcaaatctccaacgggacatcgggaggagccaccaacgacaacacctacttcggctacggcaccccctgggggtattttgactttaacagattccactgccacttttcaccacgtgactggcagcgactcatcaacaacaactggggattccggcccaagagactcagcttcaagctcttcaacatccaggtcaaggaggtcacgcagaatgaaggcaccaagaccatcgccaataacctcaccagcaccatccaggtgtttacggactcggagtaccagctgccgtacgttctcggctctgcccaccagggctgcctgcctccgttcccggcggacgtgttcacgattccccagtacggctacctaacactcaacaacggtagtcaggccgtgggacgctcctccttctactgcctggaatactttccttcgcagatgctgagaaccggcaacaacttccagtttacttacaccttcgaggacgtgcctttccacagcagctacgcccacagccagagcttggaccggctgatgaatcctctgattgaccagtacctgtactacttgtctcggattcaaacaacaggaggcacggcaaatacgcagactctgggcttcagccaaggtgggcctaatacaatggccaatcaggcaaagaactggctgccaggaccctgttaccgccaacaacgcgtctcaacgacaaccgggcaaaacaacaatagcaactttgcctggactgctgggaccaaataccatctgaatggaagaaattcattggctaatcctggcatcgctatggcaacacacaaagacgacgaggagcgtttttttcccagtaacgggatcctgatttttggcaaacaaaatgctgccagagacaatgcggattacagcgatgtcatgcccaccagcgaggaagaaatcaaaaccactaaccctgtggccacagaggaatacggtatcgtggcagataacttgcagcagcaaaacacggctcctcaaattggaactgtcaacagccagggggccttacccggtatggtctggcagaaccgggacgtgtacctgcagggtcccatctgggccaagattcctcacacggacggcaacttccacccgtctccgctgatgggcggctttggcctgaaacatcctccgcctcagatcctgatcaagaacacgcctgtacctgcggatcctccgaccaccttcaaccagtcaaagctgaactctttcatcacgcaatacagcaccggacaggtcagcgtggaaattgaatgggagctgcagaaggaaaacagcaagcgctggaaccccgagatccagtacacctccaactactacaaatctacaagtgtggactttgctgttaatacagaaggcgtgtactctgaaccccgccccattggcacccgttacctcacccgtaatctgtaa

SEQ ID NO: 12402 - DNA, 2217 bp, Artificial Sequence
  source: /note="Description of Artificial Sequence: Synthetic polynucleotide"
atggctgccgatggttatcttccagattggctcgaggacaacctctctgagggcattcgcgagtggtgggcgctgaaacctggagccccgaagcccaaagccaaccagcaaaagcaggacgacggccggggtctggtgcttcctggctacaagtacctcggacccttcaacggactcgacaagggggagcccgtcaacgcggcggacgcggcggccctcgagcacgacaaggcctacgaccagcagctgcaggcgggtgacaatccgtacctgcggtataaccacgccgacgccgagtttcaggagcgtctgcaagaagatacgtcttttgggggcaacctcgggcgagcagtcttccaggccaagaagcgggttctcgaacctctcggtctggttgaggaaggcgctaagacggctcctggaaagaagagaccggtagagccatcaccccagcgttctccagactcctctacgggcatcggcaagaagggccaacagcccgccagaaaaagactcaattttggtcagactggcgactcagagtcagttccagaccctcaacctctcggagaacctccagcagcgccctctggtgtgggacctaatacaatggctgcaggcggtggcgcaccaatggcagacaataacgaaggcgccgacggagtgggtagttcctcgggaaattggcattgcgattccacatggctgggcgacagagtcatcaccaccagcacccgaacctgggccctgcccacctacaacaaccacctctacaagcaaatctccaacgggacatcgggaggagccaccaacgacaacacctacttcggctacagcaccccctgggggtattttgactttaacagattccactgccacttttcaccacgtgactggcagcgactcatcaacaacaactggggattccggcccaagagactcagcttcaagctcttcaacatccaggtcaaggaggtcacgcagaatgaaggcaccaagaccatcgccaataacctcaccagcaccatccaggtgtttacggactcggagtaccagctgccgtacgttctcggctctgcccaccagggctgcctgcctccgttcccggcggacgtgttcacgattccccagtacggctacctaacactcaacaacggtagtcaggccgtgggacgctcctccttctactgcctggaatactttccttcgcagatgctgagaaccggcaacaacttccagtttacttacaccttcgaggacgtgcctttccacagcagctacgcccacagccagagcttggaccggccgatgaatcctctgattgaccagtacctgtactacttgtctcggattcaaacaacaggaggcacggcaaatacgcagactctgggcttcagccaaggtgggcctaatacaatggccaatcaggcaaagaactggctgccaggaccctgttaccgccaacaacgcgtctcaacgacaaccgggcaaaacaacaatagcaactttgcctggactgctgggaccaaataccatctgaatggaagaaattcattggctaatcctggcatcgctatggcaacacacaaagacgacgaggagcgtttttttcccagtaacgggatcctgatttttggcaaacaaaatgctgccagagacaatgcggattacagcgatgtcatgcccaccagcgaggaagaaatcaaaaccactaaccctgtggccacagaggaatacggtatcgtggcagataacttgcagcagcaaaacacggctcctcaaattggaactgtcaacagccagggggccttacccggtatggtctggcagaaccgggacgtgtacctgcagggtcccatctgggccaagattcctcacacggacggcaacttccacccgtctccgctgatgggcggctttggcctgaaacatcctccgcctcagatcctgatcaagaacacgcctgtacctgcggatcctccgaccaccttcaaccagtcaaagctgaactctttcatcacgcaatacagcaccggacaggtcagcgtggaaattgaatgggagctgcagaaggaaaacagcaagcgctggaaccccgagatccagtacacctccaactactacaaatctacaagtgtggactttgctgttaatacagaaggcgtgtactctgaaccccgccccattggcacccgttacctcacccgtaatctgtaa

SEQ ID NO: 12403 - DNA, 2217 bp, Artificial Sequence
  source: /note="Description of Artificial Sequence: Synthetic polynucleotide"
atggctgccgatggttatcttccagattggctcgaggacaacctctctgagggcattcgcgagtggtgggcgctgaaacctggagccccgaagcccaaagccaaccagcaaaagcaggacgacggccggggtctggtgcttcctggctacaagtacctcggacccttcaacggactcgacaagggggagcccgtcaacgcggcggacgcggcggccctcgagcacgacaaggcctacgaccagcagctgcaggcgggtgacaatccgtacctgcggtataaccacgccgacgccgagtttcaggagcgtctgcaagaagatacgtcttttgggggcaacctcgggcgagcagtcttccaggccaagaagcgggttctcgaacctctcggtctggttgaggaaggcgctaagacggctcctggaaagaagagaccggtagagccatcaccccagcgttctccagactcctctacgggcatcggcaagaagggccaacagcccgccagaaaaagactcaattttggtcagactggcgactcagagtcagttccagaccctcaacctctcggagaacctccagcagcgccctctggtgtgggacctaatacaatggctgcaggcggtggcgcaccaatggcagacaataacgaaggcgccgacggagtgggtagttcctcgggaaattggcattgcgattccacatggctgggcgacagagtcatcaccaccagcacccgaacctgggccctgcccacctacaacaaccacctctacaagcaaatctccaacgggacatcgggaggagccaccaacgacaacacctacttcggctacagcaccccctgggggtattttgactttaacagattccactgccacttttcaccacgtgactggcagcgactcatcaacaacaactggggattccggcccaagagactcagcctcaagctcttcaacatccaggtcaaggaggtcacgcagaatgaaggcaccaagaccatcgccaataacctcaccagcaccatccaggtgtttacggactcggagtaccagctgccgtacgttctcggctctgcccaccagggctgcctgcctccgttcccggcggacgtgttcacgattccccagtacggctacctaacactcaacaacggtagtcaggccgtgggacgctcctccttctactgcctggaatactttccttcgcagatgctgagaaccggcaacaacttccagtttacttacaccttcgaggacgtgcctttccacagcagctacgcccacagccagagcttggaccggctgatgaatcctctgattgaccagtacctgtactacttgtctcggattcaaacaacaggaggcacggcaaatacgcagactctgggcttcagccaaggtgggcctaatacaatggccaatcaggcaaagaactggctgccaggaccctgttaccgccaacaacgcgtctcaacgacaaccgggcaaaacaacaatagcaactttgcctggactgctgggaccaaataccatctgaatggaagaaattcattggctaatcctggcatcgctatggcaacacacaaagacgacgaggagcgtttttttcccagtaacgggatcctgatttttggcaaacaaaatgctgccagagacaatgcggattacagcgatgtcatgcccaccagcgaggaagaaatcaaaaccactaaccctgtggccacagaggaatacggtatcgtggcagataacttgcagcagcaaaacacggctcctcaaattggaactgtcaacagccagggggccttacccggtatggtctggcagaaccgggacgtgtacctgcagggtcccatctgggccaagattcctcacacggacggcaacttccacccgtctccgctgatgggcggctttggcctgaaacatcctccgcctcagatcctgatcaagaacacgcctgtacctgcggatcctccgaccaccttcaaccagtcaaagctgaactctttcatcacgcaatacagcaccggacaggtcagcgtggaaattgaatgggagctgcagaaggaaaacagcaagcgctggaaccccgagatccagtacacctccaactactacaaatctacaagtgtggactttgctgttaatacagaaggcgtgtactctgaaccccgccccattggcacccgttacctcacccgtaatctgtaa

SEQ ID NO: 12404 - DNA, 2217 bp, Artificial Sequence
  source: /note="Description of Artificial Sequence: Synthetic polynucleotide"
atggctgccgatggttatcttccagattggctcgaggacaacctctctgagggcattcgcgagtggtgggcgctgaaacctggagccccgaagcccaaagccaaccagcaaaagcaggacgacggccggggtctggtgcttcctggctacaagtacctcggacccttcaacggactcgacaagggggagcccgtcaacgcggcggacgcggcggccctcgagcacgacaaggcctacgaccagcagctgcaggcgggtgacaatccgtacctgcggtataaccacgccgacgccgagtttcaggagcgtctgcaagaagatacgtcttttgggggcaacctcgggcgagcagtcttccaggccaagaagcgggttctcgaacctctcggtctggttgaggaaggcgctaagacggctcctggaaagaagagaccggtagagccatcaccccagcgttctccagactcctctacgggcatcggcaagaagggccaacagcccgccagaaaaagactcaattttggtcagactggcgactcagagtcagttccagaccctcaacctctcggagaacctccagcagcgccctctggtgtgggacctaatacaatggctgcaggcggtggcgcaccaatggcagacaataacgaaggcgccgacggagtgggtagttcctcgggaaattggcattgcgattccacatggctgggcgacagagtcatcaccaccagcacccgaacctgggccctgcccacctacaacaaccacctctacaagcaaatctccaacgggacatcgggaggagccaccaacgacaacacctacttcggctacagcaccccctgggggtattttgactttaacagattccactgccacttttcaccacgtgactggcagcgactcatcaacaacaactggggattccggcccaagagactcagcttcaagctcttcaacatccaggtcaaggaggtcacgcagaatgaaggcaccaagaccatcgccaataacctcaccagcaccatccaggtgtttacggactcggagtaccagctgccgtacgttctcggctctgcccaccagggctgcctgcctccgttcccggcggacgtgttcacgattccccagtacggctacctaacactcaacaacggtagtcaggccgtgggacgctcctccttctactgcctggaatactttccttcgcagatgctgagaaccggcaacaacttccagtttacttacaccttcgaggacgtgcctttccacagcagctacgcccacagccagagcttggaccggctgatgaatcctctgattgaccagtacctgtactacttgtctcggattcaaacaacaggaggcacggcaaatacgcagactctgggcttcagccaaggtgggcctaatacaatggccaatcaggcaaagaactggctgccaggaccctgttaccgccaacaacgcgtctcaacgacaaccgggcaaaacaacaatagcaactttgcctggactgctgggaccaaataccatctgaatggaagaaattcattggctaatcctggcatcgctatggcaacacacaaagacgacgaggagcgtttttttcccagtaacgggatcctgatttttggcaaacaaaatgctgccagagacaatgcggattacagcgatgtcacgcccaccagcgaggaagaaatcaaaaccactaaccctgtggccacagaggaatacggtatcgtggcagataacttgcagcagcaaaacacggctcctcaaattggaactgtcaacagccagggggccttacccggtatggtctggcagaaccgggacgtgtacctgcagggtcccatctgggccaagattcctcacacggacggcaacttccacccgtctccgctgatgggcggctttggcctgaaacatcctccgcctcagatcctgatcaagaacacgcctgtacctgcggatcctccgaccaccttcaaccagtcaaagctgaactctttcatcacgcaatacagcaccggacaggtcagcgtggaaattgaatgggagctgcagaaggaaaacagcaagcgctggaaccccgagatccagtacacctccaactactacaaatctacaagtgtggactttgctgttaatacagaaggcgtgtactctgaaccccgccccattggcacccgttacctcacccgtaatctgtaa

SEQ ID NO: 12405 - DNA, 2217 bp, Artificial Sequence
  source: /note="Description of Artificial Sequence: Synthetic polynucleotide"
atggctgccgatggttatcttccagattggctcgaggacaacctctctgagggcattcgcgagtggtgggcgctgaaacctggagccccgaagcccaaagccaaccagcaaaagcaggacgacggccggggtctggtgcttcctggctacaagtacctcggacccttcaacggactcgacaagggggagcccgtcaacgcggcggacgcggcggccctcgagcacgacaaggcctacgaccagcagctgcaggcgggtgacaatccgtacctgcggtataaccacgccgacgccgagtttcaggagcgtctgcaagaagatacgtcttttgggggcaacctcgggcgagcagtcttccaggccaagaagcgggttctcgaacctctcggtctggttgaggaaggcgctaagacggctcctggaaagaagagaccggtagagccatcaccccagcgttctccagactcctctacgggcatcggcaagaagggccaacagcccgccagaaaaagactcaattttggtcagactggcgactcagagtcagttccagaccctcaacctctcggagaacctccagcagcgccctctggtgtgggacctaatacaatggctgcaggcggtggcgcaccaatggcagacaataacgaaggcgccgacggagtgggtagttcctcgggaaattggcattgcgattccacatggctgggcgacagagtcatcaccaccagcacccgaacctgggccctgcccacctacaacaaccacctctacaagcaaatctccaacgggacatcgggaggagccaccaacgacaacacctacttcggctacagcaccccctgggggtattttgactttaacagattccactgccacttttcaccacgtgactggcagcgactcatcaacaacaactggggattccggcccaagagactcagcttcaagctcttcaacatccaggtcaaggaggtcacgcagaatgaaggcaccaagaccatcgccaataacctcaccagcaccatccaggtgtttacggactcggagtaccagctgccgtacgttctcggctctgcccaccagggctgcctgcctccgttcccggcggacgtgttcacgattccccagtacggctacctaacactcaacaacggtagtcaggccgtgggacgctcctccttctactgcctggaatactttccttcgcagatgctgagaaccggcaacaacttccagtttacttacaccttcgaggacgtgcctttccacagcagctacgcccacagccagagcttggaccggctgatgaatcctctgattgaccagtacctgtactacttgtctcggattcaaacaacaggaggcacggcaaatacgcagactctgggcttcagccaaggtgggcctaatacaatggccaatcaggcaaagaactggctgccaggaccctgttaccgccaacaacgcgtctcaacgacaaccgggcaaaacaacaatagcaactttgcctggactgctgggaccaaataccatctgaatggaagaaattcattggctaatcctggcatcgctatggcaacacacaaagacgacgaggagcgtttttttcccagtaacgggatcctgatttttggcaaacaaaatgctgccagagacaatgcggattacagcgatgtcatgcccaccagcgaggaagaaatcaaaaccactaaccctgtggccacagaggaatacggtatcgtggcagataacttgcagcagcaaaacacggctcctcaaattggaactgtcaacagccagggggccttacccggtatggtccggcagaaccgggacgtgtacctgcagggtcccatctgggccaagattcctcacacggacggcaacttccacccgtctccgctgatgggcggctttggcctgaaacatcctccgcctcagatcctgatcaagaacacgcctgtacctgcggatcctccgaccaccttcaaccagtcaaagctgaactctttcatcacgcaatacagcaccggacaggtcagcgtggaaattgaatgggagctgcagaaggaaaacagcaagcgctggaaccccgagatccagtacacctccaactactacaaatctacaagtgtggactttgctgttaatacagaaggcgtgtactctgaaccccgccccattggcacccgttacctcacccgtaatctgtaa

SEQ ID NO: 12406 - DNA, 2217 bp, Artificial Sequence
  source: /note="Description of Artificial Sequence: Synthetic polynucleotide"
atggctgccgatggttatcttccagattggctcgaggacaacctctctgagggcattcgcgagtggtgggcgctgaaacctggagccccgaagcccaaagccaaccagcaaaagcaggacgacggccggggtctggtgcttcctggctacaagtacctcggacccttcaacggactcgacaagggggagcccgtcaacgcggcggacgcggcggccctcgagcacgacaaggcctacgaccagcagctgcaggcgggtgacaatccgtacctgcggtataaccacgccgacgccgagtttcaggagcgtctgcaagaagatacgtcttttgggggcaacctcgggcgagcagtcttccaggccaagaagcgggttctcgaacctctcggtctggttgaggaaggcgctaagacggctcctggaaagaagagaccggtagagccatcaccccagcgttctccagactcctctacggacatcggcaagaagggccaacagcccgccagaaaaagactcaattttggtcagactggcgactcagagtcagttccagaccctcaacctctcggagaacctccagcagcgccctctggtgtgggacctaatacaatggctgcaggcggtggcgcaccaatggcagacaataacgaaggcgccgacggagtgggtagttcctcgggaaattggcattgcgattccacatggctgggcgacagagtcatcaccaccagcacccgaacctgggccctgcccacctacaacaaccacctctacaagcaaatctccaacgggacatcgggaggagccaccaacgacaacacctacttcggctacagcaccccctgggggtattttgactttaacagattccactgccacttttcaccacgtgactggcagcgactcatcaacaacaactggggattccggcccaagagactcagcttcaagctcttcaacatccaggtcaaggaggtcacgcagaatgaaggcaccaagaccatcgccaataacctcaccagcaccatccaggtgtttacggactcggagtaccagctgccgtacgttctcggctctgcccaccagggctgcctgcctccgttcccggcggacgtgttcacgattccccagtacggctacctaacactcaacaacggtagtcaggccgtgggacgctcctccttctactgcctggaatactttccttcgcagatgctgagaaccggcaacaacttccagtttacttacaccttcgaggacgtgcctttccacagcagctacgcccacagccagagcttggaccggctgatgaatcctctgattgaccagtacctgtactacttgtctcggattcaaacaacaggaggcacggcaaatacgcagactctgggcttcagccaaggtgggcctaatacaatggccaatcaggcaaagaactggctgccaggaccctgttaccgccaacaacgcgtctcaacgacaaccgggcaaaacaacaatagcaactttgcctggactgctgggaccaaataccatctgaatggaagaaattcattggctaatcctggcatcgctatggcaacacacaaagacgacgaggagcgtttttttcccagtaacgggatcctgatttttggcaaacaaaatgctgccagagacaatgcggattacagcgatgtcatgcccaccagcgaggaagaaatcaaaaccactaaccctgtggccacagaggaatacggtatcgtggcagataacttgcagcagcaaaacacggctcctcaaattggaactgtcaacagccagggggccttacccggtatggtctggcagaaccgggacgtgtacctgcagggtcccatctgggccaagattcctcacacggacggcaacttccacccgtctccgctgatgggcggctttggcctgaaacatcctccgcctcagatcctgatcaagaacacgcctgtacctgcggatcctccgaccaccttcaaccagtcaaagctgaactctttcatcacgcaatacagcaccggacaggtcagcgtggaaattgaatgggagctgcagaaggaaaacagcaagcgctggaaccccgagatccagtacacctccaactactacaaatctacaagtgtggactttgctgttaatacagaaggcgtgtactctgaaccccgccccattggcacccgttacctcacccgtaatctgtaa

SEQ ID NO: 12407 - DNA, 2217 bp, Artificial Sequence
  source: /note="Description of Artificial Sequence: Synthetic polynucleotide"
atggctgccgatggttatcttccagattggctcgaggacaacctctctgagggcattcgcgagtggtgggcgctgaaacctggagccccgaagcccaaagccaaccagcaaaagcaggacgacggccggggtctggtgcttcctggctacaagtacctcggacccttcaacggactcgacaagggggagcccgtcaacgcggcggacgcggcggccctcgagcacgacaaggcctacgaccagcagctgcaggcgggtgacaatccgtacctgcggtataaccacgccgacgccgagtttcaggagcgtctgcaagaagatacgtcttttgggggcaacctcgggcgagcagtcttccaggccaagaagcgggttctcgaacctctcggtctggttgaggaaggcgctaagacggctcctggaaagaagagaccggtagagccatcaccccagcgttctccagactcctctacgggcatcggcaagaagggccaacagcccgccggaaaaagactcaattttggtcagactggcgactcagagtcagttccagaccctcaacctctcggagaacctccagcagcgccctctggtgtgggacctaatacaatggctgcaggcggtggcgcaccaatggcagacaataacgaaggcgccgacggagtgggtagttcctcgggaaattggcattgcgattccacatggctgggcgacagagtcatcaccaccagcacccgaacctgggccctgcccacctacaacaaccacctctacaagcaaatctccaacgggacatcgggaggagccaccaacgacaacacctacttcggctacagcaccccctgggggtattttgactttaacagattccactgccacttttcaccacgtgactggcagcgactcatcaacaacaactggggattccggcccaagagactcagcttcaagctcttcaacatccaggtcaaggaggtcacgcagaatgaaggcaccaagaccatcgccaataacctcaccagcaccatccaggtgtttacggactcggagtaccagctgccgtacgttctcggctctgcccaccagggctgcctgcctccgttcccggcggacgtgttcacgattccccagtacggctacctaacactcaacaacggtagtcaggccgtgggacgctcctccttctactgcctggaatactttccttcgcagatgctgagaaccggcaacaacttccagtttacttacaccttcgaggacgtgcctttccacagcagctacgcccacagccagagcttggaccggctgatgaatcctctgattgaccagtacctgtactacttgtctcggattcaaacaacaggaggcacggcaaatacgcagactctgggcttcagccaaggtgggcctaatacaatggccaatcaggcaaagaactggctgccaggaccctgttaccgccaacaacgcgtctcaacgacaaccgggcaaaacaacaatagcaactttgcctggactgctgggaccaaataccatctgaatggaagaaattcattggctaatcctggcatcgctatggcaacacacaaagacgacgaggagcgtttttttcccagtaacgggatcctgatttttggcaaacaaaatgctgccagagacaatgcggattacagcgatgtcatgcccaccagcgaggaagaaatcaaaaccactaaccctgtggccacagaggaatacggtatcgtggcagataacttgcagcagcaaaacacggctcctcaaattggaactgtcaacagccagggggccttacccggtatggtctggcagaaccgggacgtgtacctgcagggtcccatctgggccaagattcctcacacggacggcaacttccacccgtctccgctgatgggcggctttggcctgaaacatcctccgcctcagatcctgatcaagaacacgcctgtacctgcggatcctccgaccaccttcaaccagtcaaagctgaactctttcatcacgcaatacagcaccggacaggtcagcgtggaaattgaatgggagctgcagaaggaaaacagcaagcgctggaaccccgagatccagtacacctccaactactacaaatctacaagtgtggactttgctgttaatacagaaggcgtgtactctgaaccccgccccattggcacccgttacctcacccgtaatctgtaa

SEQ ID NO: 12408 - DNA, 2217 bp, Artificial Sequence
  source: /note="Description of Artificial Sequence: Synthetic polynucleotide"
atggctgccgatggttatcttccagattggctcgaggacaacctctctgagggcattcgcgagtggtgggcgctgaaacctggagccccgaagcccaaagccaaccagcaaaagcaggacgacggccggggtctggtgcttcctggctacaagtacctcggacccttcaacggactcgacaagggggagcccgtcaacgcggcggacgcggcggccctcgagcacgacaaggcctacgaccagcagctgcaggcgggtgacaatccgtacctgcggtataaccacgccgacgccgagtttcaggagcgtctgcaagaagatacgtcttttgggggcaacctcgggcgagcagtcttccaggccaagaagcgggttctcgaacctctcggtctggttgaggaaggcgctaagacggctcctggaaagaagagaccggtagagccatcaccccagcgttctccagactcctctacgggcatcggcaagaagggccaacagcccgccagaaaaagactcaattttggtcagactggcgactcagagtcagttccagaccctcaacctctcggagaacctccagcagcgccctctggtgtgggacctaatacaatggctgcaggcggtggcgcaccaatggcagacaataacgaaggcgccgacggagtgggtagttcctcgggaaattggcattgcgattccacatggctgggcgacagagtcatcaccaccagcacccgaacctgggccctgcccacctacaacaaccacctctacaagcaaatctccaacgggacatcgggaggagccaccaacgacaacacctacttcggctacagcaccccctgggggtattttgactttaacagattccactgccacttttcaccacgtgactggcagcgactcatcaacaacaactggggattccggcccaagagactcagcttcaagctcttcaacatccaggtcaaggaggtcacgcagaatgaaggcaccaagaccatcgccaataacctcaccagcaccatccaggtgtttacggactcggagtaccagctgccgtacgttctcggctctgcccaccagggctgcctgcctccgttcccggcggacgtgttcacgattccccagtacggctacctaacactcaacaacggtagtcaggccgtgggacgcccctccttctactgcctggaatactttccttcgcagatgctgagaaccggcaacaacttccagtttacttacaccttcgaggacgtgcctttccacagcagctacgcccacagccagagcttggaccggctgatgaatcctctgattgaccagtacctgtactacttgtctcggattcaaacaacaggaggcacggcaaatacgcagactctgggcttcagccaaggtgggcctaatacaatggccaatcaggcaaagaactggctgccaggaccctgttaccgccaacaacgcgtctcaacgacaaccgggcaaaacaacaatagcaactttgcctggactgctgggaccaaataccatctgaatggaagaaattcattggctaatcctggcatcgctatggcaacacacaaagacgacgaggagcgtttttttcccagtaacgggatcctgatttttggcaaacaaaatgctgccagagacaatgcggattacagcgatgtcatgcccaccagcgaggaagaaatcaaaaccactaaccctgtggccacagaggaatacggtatcgtggcagataacttgcagcagcaaaacacggctcctcaaattggaactgtcaacagccagggggccttacccggtatggtctggcagaaccgggacgtgtacctgcagggtcccatctgggccaagattcctcacacggacggcaacttccacccgtctccgctgatgggcggctttggcctgaaacatcctccgcctcagatcctgatcaagaacacgcctgtacctgcggatcctccgaccaccttcaaccagtcaaagctgaactctttcatcacgcaatacagcaccggacaggtcagcgtggaaattgaatgggagctgcagaaggaaaacagcaagcgctggaaccccgagatccagtacacctccaactactacaaatctacaagtgtggactttgctgttaatacagaaggcgtgtactctgaaccccgccccattggcacccgttacctcacccgtaatctgtaa

SEQ ID NO: 12409 - DNA, 2217 bp, Artificial Sequence
  source: /note="Description of Artificial Sequence: Synthetic polynucleotide"
atggctgccgatggttatcttccagattggctcgaggacaacctctctgagggcattcgcgagtggtgggcgctgaaacctggagccccgaagcccaaagccaaccagcaaaagcaggacgacggccggggtctggtgcttcctggctacaagtacctcggacccttcaacggactcgacaagggggagcccgtcaacgcggcggacgcggcggccctcgagcacgacaaggcctacgaccagcagctgcaggcgggtgacaatccgtacctgcggtataaccacgccgacgccgagtttcaggagcgtctgcaagaagatacgtcttttgggggcaacctcgggcgagcagtcttccaggccaagaagcgggttctcgaacctctcggtctggttgaggaaggcgctaagacggctcctggaaagaagagaccggtagagccatcaccccagcgttctccagactcctctacgggcatcggcaagaagggccaacagcccgccagaaaaagactcaattttggtcagactggcgactcagagtcagttccagaccctcaacctctcggagaacctccagcagcgccctctggtgtgggacctaatacaatggctgcaggcggtggcgcaccaatggcagacaataacgaaggcgccgacggagtgggtagttcctcgggaaattggcattgcgattccacatggctgggcgacagagtcatcaccaccagcacccgaacctgggccctgcccacctacaacaaccacctctacaagcaaatctccaacgggacatcgggaggagccaccaacgacaacacctacttcggctacagcaccccctgggggtattttgactttaacagattccactgccacttttcaccacgtgactggcagcgactcatcaacaacaactggggattccggcccaagagactcagcttcaagctcttcaacatccaggtcaaggcggtcacgcagaatgaaggcaccaagaccatcgccaataacctcaccagcaccatccaggtgtttacggactcggagtaccagctgccgtacgttctcggctctgcccaccagggctgcctgcctccgttcccggcggacgtgttcacgattccccagtacggctacctaacactcaacaacggtagtcaggccgtgggacgctcctccttctactgcctggaatactttccttcgcagatgctgagaaccggcaacaacttccagtttacttacaccttcgaggacgtgcctttccacagcagctacgcccacagccagagcttggaccggctgatgaatcctctgattgaccagtacctgtactacttgtctcggattcaaacaacaggaggcacggcaaatacgcagactctgggcttcagccaaggtgggcctaatacaatggccaatcaggcaaagaactggctgccaggaccctgttaccgccaacaacgcgtctcaacgacaaccgggcaaaacaacaatagcaactttgcctggactgctgggaccaaataccatctgaatggaagaaattcattggctaatcctggcatcgctatggcaacacacaaagacgacgaggagcgtttttttcccagtaacgggatcctgatttttggcaaacaaaatgctgccagagacaatgcggattacagcgatgtcatgcccaccagcgaggaagaaatcaaaaccactaaccctgtggccacagaggaatacggtatcgtggcagataacttgcagcagcaaaacacggctcctcaaattggaactgtcaacagccagggggccttacccggtatggtctggcagaaccgggacgtgtacctgcagggtcccatctgggccaagattcctcacacggacggcaacttccacccgtctccgctgatgggcggctttggcctgaaacatcctccgcctcagatcctgatcaagaacacgcctgtacctgcggatcctccgaccaccttcaaccagtcaaagctgaactctttcatcacgcaatacagcaccggacaggtcagcgtggaaattgaatgggagctgcagaaggaaaacagcaagcgctggaaccccgagatccagtacacctccaactactacaaatctacaagtgtggactttgctgttaatacagaaggcgtgtactctgaaccccgccccattggcacccgttacctcacccgtaatctgtaa

SEQ ID NO: 12410 - DNA, 2217 bp, Artificial Sequence
  source: /note="Description of Artificial Sequence: Synthetic polynucleotide"
atggctgccgatggttatcttccagattggctcgaggacaacctctctgagggcattcgcgagtggtgggcgctgaaacctggagccccgaagcccaaagccaaccagcaaaagcaggacgacggccggggtctggtgcttcctggctacaagtacctcggacccttcaacggactcgacaagggggagcccgtcaacgcggcggacgcggcggccctcgagcacgacaaggcctacgaccagcagctgcaggcgggtgacaatccgtacctgcggtataaccacgccgacgccgagtttcaggagcgtctgcaagaagatacgtcttttgggggcaacctcgggcgagcagtcttccaggccaagaagcgggttctcgaacctctcggtctggttgaggaaggcgctaagacggctcctggaaagaagagaccggtagagccatcaccccagcgttctccagactcctctacgggcatcggcaagaagggccaacagcccgccagaaaaagactcaattttggtcagactggcgactcagagtcagttccagaccctcaacctctcggagaacctccagcagcgccctctggtgtgggacctaatacaatggctgcaggcggtggcgcaccaatggcagacaataacgaaggcgccgacggagtgggtagttcctcgggaaattggcattgcgattccacatggctgggcgacagagtcatcaccaccagcacccgaacctgggccctgcccacctacaacaaccacctctacaagcaaatctccaacgggacatcgggaggagccaccaacgacaacacctacttcggctacagcaccccctgggggtattttgactttaacagattccactgccacttttcaccacgtgactggcagcgactcatcaacaacaactggggattccggcccaagagactcagcttcaagctcttcaacatccaggtcaaggaggtcacgcagaatgaaggcaccaagaccatcgccaataacctcaccagcaccatccaggtgtttacggactcggagtaccagctgccgtacgttctcggctctgcccaccagggctgcctgcctccgttcccggcggacgtgttcacgattccccagtacggctacctaacactcaacaacggtagtcaggccgtgggacgctcctccttctactgcctggaatactttccttcgcagatgctgagaaccggcaacaacttccagtttacttacaccttcgaggacgtgcctttccacagcagctacgcccacagccagagcttggaccggctgatgaatcctctgattgaccagtacctgtactacttgtctcggattcaaacaacaggaggcacggcaaatacgcagactctgggcttcagccaaggtgggcctaatacaatggccaatcaggcaaagaactggctgccaggaccctgttaccgccaacaacgcgtctcaacgacaaccgggcaaaacaacaatagcaactttgcctggactgctgggaccaaataccatctgaatggaagaaattcattggctaatcctggcatcgctatggcaacacacaaagacgacgaggagcgtttttttcccagtaacgggatcctgatttttggcaaacaaaatgctgccagagacaatgcggattacagcgatgtcatgcccaccagcgaggaagaaatcaaaaccactaaccctgtggccacagaggaatacggtatcgtggcagataacttgcagcagcaaaacacggctcctcaaattggaactgtcaacagccagggggccttacccggtatggtctggcagaaccgggacgtgtacctgcagggtcccatctgggccaagattcctcacacggacggcaacttccacccgtctccgctgatgggcggctttggcctgaaacatcctccgcctcagatcctgatcaagaacacgcctgtacctgcggatcctccgaccgccttcaaccagtcaaagctgaactctttcatcacgcaatacagcaccggacaggtcagcgtggaaattgaatgggagctgcagaaggaaaacagcaagcgctggaaccccgagatccagtacacctccaactactacaaatctacaagtgtggactttgctgttaatacagaaggcgtgtactctgaaccccgccccattggcacccgttacctcacccgtaatctgtaa

SEQ ID NO: 12411 - DNA, 2217 bp, Artificial Sequence
  source: /note="Description of Artificial Sequence: Synthetic polynucleotide"
atggctgccgatggttatcttccagattggctcgaggacaacctctctgagggcattcgcgagtggtgggcgctgaaacctggagccccgaagcccaaagccaaccagcaaaagcaggacgacggccggggtctggtgcttcctggctacaagtacctcggacccttcaacggactcgacaagggggagcccgtcaacgcggcggacgcggcggccctcgagcacgacaaggcctacgaccagcagctgcaggcgggtgacaatccgtacctgcggtataaccacgccgacgccgagtttcaggagcgtctgcaagaagatacgtcttttgggggcaacctcgggcgagcagtcttccaggccaagaagcgggttctcgaacctctcggtctggttgaggaaggcgctaagacggctcctggaaagaagagaccggtagagccatcaccccagcgttctccagactcctctacgggcatcggcaagaagggccaacagcccgccagaaaaagactcaattttggtcagactggcgactcagagtcagttccagaccctcaacctctcggagaacctccagcagcgccctctggtgtgggacctaatacaatggctgcaggcggtggcgcaccaatggcagacaataacgaaggcgccgacggagtgggtagttcctcgggaaattggcattgcgattccacatggctgggcgacagagtcatcaccaccagcacccgaacctgggccctgcccacctacaacaaccacctctacaagcaaatctccaacgggacatcgggaggagccaccaacgacaacacctacttcggctacagcaccccctgggggtattttgactttaacagattccgctgccacttttcaccacgtgactggcagcgactcatcaacaacaactggggattccggcccaagagactcagcttcaagctcttcaacatccaggtcaaggaggtcacgcagaatgaaggcaccaagaccatcgccaataacctcaccagcaccatccaggtgtttacggactcggagtaccagctgccgtacgttctcggctctgcccaccagggctgcctgcctccgttcccggcggacgtgttcacgattccccagtacggctacctaacactcaacaacggtagtcaggccgtgggacgctcctccttctactgcctggaatactttccttcgcagatgctgagaaccggcaacaacttccagtttacttacaccttcgaggacgtgcctttccacagcagctacgcccacagccagagcttggaccggctgatgaatcctctgattgaccagtacctgtactacttgtctcggattcaaacaacaggaggcacggcaaatacgcagactctgggcttcagccaaggtgggcctaatacaatggccaatcaggcaaagaactggctgccaggaccctgttaccgccaacaacgcgtctcaacgacaaccgggcaaaacaacaatagcaactttgcctggactgctgggaccaaataccatctgaatggaagaaattcattggctaatcctggcatcgctatggcaacacacaaagacgacgaggagcgtttttttcccagtaacgggatcctgatttttggcaaacaaaatgctgccagagacaatgcggattacagcgatgtcatgcccaccagcgaggaagaaatcaaaaccactaaccctgtggccacagaggaatacggtatcgtggcagataacttgcagcagcaaaacacggctcctcaaattggaactgtcaacagccagggggccttacccggtatggtctggcagaaccgggacgtgtacctgcagggtcccatctgggccaagattcctcacacggacggcaacttccacccgtctccgctgatgggcggctttggcctgaaacatcctccgcctcagatcctgatcaagaacacgcctgtacctgcggatcctccgaccaccttcaaccagtcaaagctgaactctttcatcacgcaatacagcaccggacaggtcagcgtggaaattgaatgggagctgcagaaggaaaacagcaagcgctggaaccccgagatccagtacacctccaactactacaaatctacaagtgtggactttgctgttaatacagaaggcgtgtactctgaaccccgccccattggcacccgttacctcacccgtaatctgtaa

SEQ ID NO: 12412 - DNA, 2217 bp, Artificial Sequence
  source: /note="Description of Artificial Sequence: Synthetic polynucleotide"
atggctgccgatggttatcttccagattggctcgaggacaacctctctgagggcattcgcgagtggtgggcgctgaaacctggagccccgaagcccaaagccaaccagcaaaagcaggacgacggccggggtctggtgcttcctggctacaagtacctcggacccttcaacggactcgacaagggggagcccgtcaacgcggcggacgcggcggccctcgagcacgacaaggcctacgaccagcagctgcaggcgggtgacaatccgtacctgcggtataaccacgccgacgccgagtttcaggagcgtctgcaagaagatacgtcttttgggggcaacctcgggcgagcagtcttccaggccaagaagcgggttctcgaacctctcggtctggttgaggaaggcgctaagacggctcctggaaagaagagaccggtagagccatcaccccagcgttctccagactcctctacgggcatcggcaagaagggccaacagcccgccagaaaaagactcaattttggtcagactggcgactcagagtcagttccagaccctcaacctctcggagaacctccagcagcgccctctggtgtgggacctaatacaatggctgcaggcggtggcgcaccaatggcagacaataacgaaggcgccgacggagtgggtagttcctcgggaaattggcattgcgattccacatggctgggcgacagagtcatcaccaccagcacccgaacctgggccctgcccacctacaacaaccacctctacaagcaaatctccaacgggacatcgggaggagccaccaacgacaacacctacttcggctacagcaccccctgggggtattttgactttaacagattccactgccacttttcaccacgtgactggcagcgactcatcaacaacaactggggattccggcccaagagactcagcttcaagctcttcaacatccaggtcaaggaggtcacgcagaatgaaggcaccaagaccatcgccaataacctcaccagcaccatccaggtgtttacggactcggagtaccagctgccgtacgttctcggctctgcccaccagggctgcctgcctccgttcccggcggacgtgttcacgattccccagtacggctacctaacactcaacaacggtagtcaggccgtgggacgctcctccttctactgcctggaatactttccttcgcagatgctgagaaccggcaacaacttccagtttacttacaccctcgaggacgtgcctttccacagcagctacgcccacagccagagcttggaccggctgatgaatcctctgattgaccagtacctgtactacttgtctcggattcaaacaacaggaggcacggcaaatacgcagactctgggcttcagccaaggtgggcctaatacaatggccaatcaggcaaagaactggctgccaggaccctgttaccgccaacaacgcgtctcaacgacaaccgggcaaaacaacaatagcaactttgcctggactgctgggaccaaataccatctgaatggaagaaattcattggctaatcctggcatcgctatggcaacacacaaagacgacgaggagcgtttttttcccagtaacgggatcctgatttttggcaaacaaaatgctgccagagacaatgcggattacagcgatgtcatgcccaccagcgaggaagaaatcaaaaccactaaccctgtggccacagaggaatacggtatcgtggcagataacttgcagcagcaaaacacggctcctcaaattggaactgtcaacagccagggggccttacccggtatggtctggcagaaccgggacgtgtacctgcagggtcccatctgggccaagattcctcacacggacggcaacttccacccgtctccgctgatgggcggctttggcctgaaacatcctccgcctcagatcctgatcaagaacacgcctgtacctgcggatcctccgaccaccttcaaccagtcaaagctgaactctttcatcacgcaatacagcaccggacaggtcagcgtggaaattgaatgggagctgcagaaggaaaacagcaagcgctggaaccccgagatccagtacacctccaactactacaaatctacaagtgtggactttgctgttaatacagaaggcgtgtactctgaaccccgccccattggcacccgttacctcacccgtaatctgtaa

SEQ ID NO: 12413 - DNA, 2217 bp, Artificial Sequence
  source: /note="Description of Artificial Sequence: Synthetic polynucleotide"
atggctgccgatggttatcttccagattggctcgaggacaacctctctgagggcattcgcgagtggtgggcgctgaaacctggagccccgaagcccaaagccaaccagcaaaagcaggacgacggccggggtctggtgcttcctggctacaagtacctcggacccttcaacggactcgacaagggggagcccgtcaacgcggcggacgcggcggccctcgagcacgacaaggcctacgaccagcagctgcaggcgggtgacaatccgtacctgcggtataaccacgccgacgccgagtttcaggagcgtctgcaagaagatacgtcttttgggggcaacctcgggcgagcagtcttccaggccaagaagcgggttctcgaacctctcggtctggttgaggaaggcgctaagacggctcctggaaagaagagaccggtagagccatcaccccagcgttctccagactcctctacgggcatcggcaagaagggccaacagcccgccagaaaaagactcaattttggtcagactggcgactcagagtcagttccagaccctcaacctctcggagaacctccagcagcgccctctggtgtgggacctaatacaatggctgcaggcggtggcgcaccaatggcagacaataacgaaggcgccgacggagtgggtagttcctcgggaaattggcattgcgattccacatggctgggcgacagagtcatcaccaccagcacccgaacctgggccctgcccacctacaacaaccacctctacaagcaaatctccaacgggacatcgggaggagccaccaacgacaacacctacttcggctacagcaccccctgggggtattttgactttaacagattccactgccacttttcaccacgtgactggcagcgactcatcaacaacaactggggattccggcccaagagactcagcttcaagctcttcaacatccaggtcaaggaggtcacgcagaatgaaggcaccaagaccatcgccaataacctcaccagcaccatccaggtgtttacggactcggagtaccagctgccgtacgttctcggctctgcccaccagggctgcctgcctccgttcccggcggacgtgttcacgattccccagtacggctacctaacactcaacaacggtagtcaggccgtgggacgctcctccttctactgcctggaatactttccttcgcagatgctgagaaccggcaacaacttccagtttacttacaccttcgaggacgtgcctttccacagcagctacgcccacagccagagcttggaccggctgatgaatcctctgattgaccagtacctgtactacttgtctcggattcaaacaacaggaggcacggcaaatacgcagactctgggcttcagccaaggtgggcctaatacaatggccaatcaggcaaagaactggctgccaggaccctgttaccgccaacaacgcgtctcaacgacaaccgggcaaaacaacaatagcaactttgcctggactgctgggaccaaataccatctgaatggaagaaattcattggctaatcctggcatcgctatggcaacacacaaagacgacgaggagcgtttttttcccagtaacgggatcctgatttttggcaaacaaaatgctgccagagacaatgcggattacagcgatgtcatgcccaccagcgaggaagaaatcaaaaccactaaccctgtggccacagaggaatacggtatcgtggcagataacttgcagcagcaaagcacggctcctcaaattggaactgtcaacagccagggggccttacccggtatggtctggcagaaccgggacgtgtacctgcagggtcccatctgggccaagattcctcacacggacggcaacttccacccgtctccgctgatgggcggctttggcctgaaacatcctccgcctcagatcctgatcaagaacacgcctgtacctgcggatcctccgaccaccttcaaccagtcaaagctgaactctttcatcacgcaatacagcaccggacaggtcagcgtggaaattgaatgggagctgcagaaggaaaacagcaagcgctggaaccccgagatccagtacacctccaactactacaaatctacaagtgtggactttgctgttaatacagaaggcgtgtactctgaaccccgccccattggcacccgttacctcacccgtaatctgtaa

SEQ ID NO: 12414 - DNA, 2217 bp, Artificial Sequence
  source: /note="Description of Artificial Sequence: Synthetic polynucleotide"
atggctgccgatggttatcttccagattggctcgaggacaacctctctgagggcattcgcgagtggtgggcgctgaaacctggagccccgaagcccaaagccaaccagcaaaagcaggacgacggccggggtctggtgcttcctggctacaagtacctcggacccttcaacggactcgacaagggggagcccgtcaacgcggcggacgcggcggccctcgagcacgacaaggcctacgaccagcagctgcaggcgggtgacaatccgtacctgcggtataaccacgccgacgccgagtttcaggagcgtctgcaagaagatacgtcttttgggggcaacctcgggcgagcagtcttccaggccaagaagcgggttctcgaacctctcggtctggttgaggaaggcgctaagacggctcctggaaagaagagacyggtagagccatcaccccagcgttctccagactcctctacgggcatcggcaagaagggccaacagcccgccagaaaaagactcaattttggtcagactggcgactcagagtcagttccagaccctcaacctctcggagaacctccagcagcgccctctggtgtgggacctaatacaatggctgcaggcggtggcgcaccaatggcagacaataacgaaggcgccgacggagtgggtagttcctcgggaaattggcattgcgattccacatggctgggcgacagagtcatcaccaccagcacccgaacctgggccctgcccacctacaacaaccacctctacaagcaaatctccaacgggacatcgggaggagccaccaacgacaacacctacttcggctacagcaccccctgggggtattttgactttaacagattccactgccacttttcaccacgtgactggcagcgactcatcaacaacaactggggattccggcccaagagactcagcttcaagctcttcaacatccaggtcaaggaggtcacgcagaatgaaggcaccaagaccatcgccaataacctcaccagcaccatccaggtgtttacggactcggagtaccagctgccgtacgttctcggctctgcccaccagggctgcctgcctccgttcccggcggacgtgttcacgattccccagtacggctacctaacactcaacaacggtagtcaggccgtgggacgctcctccttctactgcctggaatactttccttcgcagatgctgagaaccggcaacaacttccagtttacttacaccttcgaggacgtgcctttccacagcagctacgcccacagccagagcttggaccggctgatgaatcctctgattgaccagtacctgtactacttgtctcggattcaaacaacaggaggcacggcaaatacgcagactctgggcttcagccaaggtgggcctaatacaatggccaatcaggcaaagaactggctgccaggaccctgttaccgccaacaacgcgtctcaacgacaaccgggcaaaacaacaatagcaactttgcctggactgctgggaccaaataccatctgaatggaagaaattcattggctaatcctggcatcgctatggcaacacacaaagacgacgaggagcgtttttttcccagtaacgggatcctgatttttggcaaacaaaatgctgccagagacaatgcggattacagcgatgtcatgcccaccagcgaggaagaaatcaaaaccactaaccctgtggccacagaggaatacggtatcgtggcagataacttgcagcagcaaaacacggctcctcaaattggaactgtcagcagccagggggccttacccggtatggtctggcagaaccgggacgtgtacctgcagggtcccatctgggccaagattcctcacacggacggcaacttccacccgtctccgctgatgggcggctttggcctgaaacatcctccgcctcagatcctgatcaagaacacgcctgtacctgcggatcctccgaccaccttcaaccagtcaaagctgaactctttcatcacgcaatacagcaccggacaggtcagcgtggaaattgaatgggagctgcagaaggaaaacagcaagcgctggaaccccgagatccagtacacctccaactactacaaatctacaagtgtggactttgctgttaatacagaaggcgtgtactctgaaccccgccccattggcacccgttacctcacccgtaatctgtaa

SEQ ID NO: 12415 - DNA, 2217 bp, Artificial Sequence
  source: /note="Description of Artificial Sequence: Synthetic polynucleotide"
atggctgccgatggttatcttccagattggctcgaggacaacctctctgagggcattcgcgagtggtgggcgctgaaacctggagccccgaagcccaaagccaaccagcaaaagcaggacgacggccggggtctggtgcttcctggctacaagtacctcggacccttcaacggactcgacaagggggagcccgtcaacgcggcggacgcggcggccctcgagcacgacaaggcctacgaccagcagctgcaggcgggtgacaatccgtacctgcggtataaccacgccgacgccgagtttcaggagcgtctgcaagaagatacgtcttttgggggcaacctcgggcgagcagtcttccaggccaagaagcgggttctcgaacctctcggtctggttgaggaaggcgctaagacggctcctggaaagaagagaccggtagagccatcaccccagcgttctccagactcctctacgggcatcggcaagaagggccaacagcccgccagaaaaagactcaattttggtcagactggcgactcagagtcagttccagaccctcaacctctcggagaacctccagcagcgccctctggtgtgggacctaatacaatggctgcaggcggtggcgcaccaatggcagacaataacgaaggcgccgacggagtgggtagttcctcgggaaattggcattgcgattccacatggctgggcgacagagtcatcaccaccagcacccgaacctgggccctgcccacctacaacaaccacctctacaagcaaatctccaacgggacatcgggaggagccaccaacgacaacacctacttcggctacagcaccccctgggggtattttgactttaacagattccactgccacttttcaccacgtgactggcagcgactcatcaacaacaactggggattccggcccaagagactcagcttcaagctcttcaacatccaggtcaaggaggtcacgcagaatgaaggcaccaagaccatcgccaataacctcaccagcaccatccaggtgtttacggactcggagtaccagctgccgtacgttctcggctctgcccaccagggctgcctgcctccgttcccggcggacgtgttcacgattccccagtacggctacctaacactcaacaacggtagtcaggccgtgggacgctcctccttctactgcctggaatactttccttcgcagatgctgagaaccggcaacaacttccagtttacttacaccttcgaggacgtgcctttccacagcagctacgcccacagccagagcttggaccggctgatgaatcctctgattgaccagtacctgtactacttgtctcggattcaaacaacaggaggcacggcaaatacgcagactctgggcttcagccaaggtgggcctaatacaatggccaatcaggcaaagaactggctgccaggaccctgttaccgccaacaacgcgtctcaacgacaaccgggcaaaacaacaatagcaactttgcctggactgctgggaccaaataccatctgaatggaagaaattcattggctaatcctggcatcgctatggcaacacacaaagacgacgaggagcgtttttttcccagtaacgggatcctgatttttggcaaacaaagtgctgccagagacaatgcggattacagcgatgtcatgcccaccagcgaggaagaaatcaaaaccactaaccctgtggccacagaggaatacggtatcgtggcagataacttgcagcagcaaaacacggctcctcaaattggaactgtcaacagccagggggccttacccggtatggtctggcagaaccgggacgtgtacctgcagggtcccatctgggccaagattcctcacacggacggcaacttccacccgtctccgctgatgggcggctttggcctgaaacatcctccgcctcagatcctgatcaagaacacgcctgtacctgcggatcctccgaccaccttcaaccagtcaaagctgaactctttcatcacgcaatacagcaccggacaggtcagcgtggaaattgaatgggagctgcagaaggaaaacagcaagcgctggaaccccgagatccagtacacctccaactactacaaatctacaagtgtggactttgctgttaatacagaaggcgtgtactctgaaccccgccccattggcacccgttacctcacccgtaatctgtaa

SEQ ID NO: 12416 - DNA, 2217 bp, Artificial Sequence
  source: /note="Description of Artificial Sequence: Synthetic polynucleotide"
atggctgccgatggttatcttccagattggctcgaggacaacctctctgagggcattcgcgagtggtgggcgctgaaacctggagccccgaagcccaaagccaaccagcaaaagcaggacgacggccggggtctggtgcttcctggctacaagtacctcggacccttcaacggactcgacaagggggagcccgtcaacgcggcggacgcggcggccctcgagcacgacaaggcctacgaccagcagctgcaggcgggtgacaatccgtacctgcggtataaccacgccgacgccgagtttcaggagcgtctgcaagaagatacgtcttttgggggcaacctcgggcgagcagtcttccaggccaagaagcgggttctcgaacctctcggtctggttgaggaaggcgctaagacggctcctggaaagaagagaccggtagagccatcaccccagcgttctccagactcctctacgggcatcggcaagaagggccaacagcccgccagaaaaagactcaattttggtcagactggcgactcagagtcagttccagaccctcaacctctcggagaacctccagcagcgccctctggtgtgggacctaatacaatggctgcaggcggtggcgcaccaatggcagacaataacgaaggcgccgacggagtgggtagttcctcgggaaattggcattgcgattccacatggctgggcgacagagtcatcaccaccagcacccgaacctgggccctgcccacctacaacaaccacctctacaagcaaatctccaacgggacatcgggaggagccaccaacgacaacacctacttcggctacagcaccccctgggggtattttgactttaacagattccactgccacttttcaccacgtgactggcagcgactcatcaacaacaactggggattccggcccaagagactcagcttcaagctcttcaacatccaggtcaaggaggtcacgcagaatgaaggcaccaagaccatcgccaataacctcaccagcaccatccaggtgtttacggactcggagtaccagctgccgtacgttctcggctctgcccaccagggctgcctgcctccgttcccggcggacgtgttcacgattccccagtacggctacctaacactcaacaacggtagtcaggccgtgggacgctcctccttctactgcctggaatactttccttcgcagatgctgagaaccggcaacaacttccagtttacttacaccttcgaggacgtgcctttccacagcagctacgcccacagccagagcttggaccggctgatgaatcctctgattgaccagtacctgtactacttgtctcggattcaaacagcaggaggcacggcaaatacgcagactctgggcttcagccaaggtgggcctaatacaatggccaatcaggcaaagaactggctgccaggaccctgttaccgccaacaacgcgtctcaacgacaaccgggcaaaacaacaatagcaactttgcctggactgctgggaccaaataccatctgaatggaagaaattcattggctaatcctggcatcgctatggcaacacacaaagacgacgaggagcgtttttttcccagtaacgggatcctgatttttggcaaacaaaatgctgccagagacaatgcggattacagcgatgtcatgcccaccagcgaggaagaaatcaaaaccactaaccctgtggccacagaggaatacggtatcgtggcagataacttgcagcagcaaaacacggctcctcaaattggaactgtcaacagccagggggccttacccggtatggtctggcagaaccgggacgtgtacctgcagggtcccatctgggccaagattcctcacacggacggcaacttccacccgtctccgctgatgggcggctttggcctgaaacatcctccgcctcagatcctgatcaagaacacgcctgtacctgcggatcctccgaccaccttcaaccagtcaaagctgaactctttcatcacgcaatacagcaccggacaggtcagcgtggaaattgaatgggagctgcagaaggaaaacagcaagcgctggaaccccgagatccagtacacctccaactactacaaatctacaagtgtggactttgctgttaatacagaaggcgtgtactctgaaccccgccccattggcacccgttacctcacccgtaatctgtaa

SEQ ID NO: 12417 - DNA, 2217 bp, Artificial Sequence
  source: /note="Description of Artificial Sequence: Synthetic polynucleotide"
atggctgccgatggttatcttccagattggctcgaggacaacctctctgagggcattcgcgagtggtgggcgctgaaacctggagccccgaagcccaaagccaaccagcaaaagcaggacgacggccggggtctggtgcttcctggctacaagtacctcggacccttcaacggactcgacaagggggagcccgtcaacgcggcggacgcggcggccctcgagcacgacaaggcctacgaccagcagctgcaggcgggtgacaatccgtacctgcggtataaccacgccgacgccgagtttcaggagcgtctgcaagaagatacgtcttttgggggcaacctcgggcgagcagtcttccaggccaagaagcgggttctcgaacctctcggtctggttgaggaaggcgctaagacggctcctggaaagaagagaccggtagagccatcaccccagcgttctccagactcctctacgggcatcggcaagaagggccaacagcccgccagaaaaagactcaattttggtcagactggcgactcagagtcagttccagaccctcaacctctcggagaacctccagcagcgccctctggtgtgggacctaatacaatggctgcaggcggtggcgcaccaatggcagacaataacgaaggcgccgacggagtgggtagttcctcgggaaattggcattgcgattccacatggctgggcgacagagtcatcaccaccagcacccgaacctgggccctgcccacctacaacaaccacctctacaagcaaatctccaacgggacatcgggaggagccaccaacgacaacacctacttcggctacagcaccccctgggggtattttgactttaacagattccactgccacttttcaccacgtgactggcagcgactcatcaacaacaactggggattccggcccaagagactcagcttcaagctcttcaacatccaggtcaaggaggtcacgcagaatgaaggcaccaagaccatcgccaataacctcaccagcaccatccaggtgtttacggactcggagtaccagctgccgtacgttctcggctctgcccaccagggctgcctgcctccgttcccggcggacgtgttcacgattccccagtacggctacctaacactcaacaacggtagtcaggccgtgggacgctcctccttctactgcctggaatactttccttcgcagatgctgagaaccggcaacaacttccagtttacttacaccttcgaggacgtgcctttccacagcagctacgcccacagccagaacttggaccggctgatgaatcctctgattgaccagtacctgtactacttgtctcggattcaaacaacaggaggcacggcaaatacgcagactctgggcttcagccaaggtgggcctaatacaatggccaatcaggcaaagaactggctgccaggaccctgttaccgccaacaacgcgtctcaacgacaaccgggcaaaacaacaatagcaactttgcctggactgctgggaccaaataccatctgaatggaagaaattcattggctaatcctggcatcgctatggcaacacacaaagacgacgaggagcgtttttttcccagtaacgggatcctgatttttggcaaacaaaatgctgccagagacaatgcggattacagcgatgtcatgcccaccagcgaggaagaaatcaaaaccactaaccctgtggccacagaggaatacggtatcgtggcagataacttgcagcagcaaaacacggctcctcaaattggaactgtcaacagccagggggccttacccggtatggtctggcagaaccgggacgtgtacctgcagggtcccatctgggccaagattcctcacacggacggcaacttccacccgtctccgctgatgggcggctttggcctgaaacatcctccgcctcagatcctgatcaagaacacgcctgtacctgcggatcctccgaccaccttcaaccagtcaaagctgaactctttcatcacgcaatacagcaccggacaggtcagcgtggaaattgaatgggagctgcagaaggaaaacagcaagcgctggaaccccgagatccagtacacctccaactactacaaatctacaagtgtggactttgctgttaatacagaaggcgtgtactctgaaccccgccccattggcacccgttacctcacccgtaatctgtaa

SEQ ID NO: 12418 - DNA, 2217 bp, Artificial Sequence
  source: /note="Description of Artificial Sequence: Synthetic polynucleotide"
atggctgccgatggttatcttccagattggctcgaggacaacctctctgagggcattcgcgagtggtgggcgctgaaacctggagccccgaagcccaaagccaaccagcaaaagcaggacgacggccggggtctggtgcttcctggctacaagtacctcggacccttcaacggactcgacaagggggagcccgtcaacgcggcggacgcggcggccctcgagcacgacaaggcctacgaccagcagctgcaggcgggtgacaatccgtacctgcggtataaccacgccgacgccgagtttcaggagcgtctgcaagaagatacgtcttttgggggcaacctcgggcgagcagtcttccaggccaagaagcgggttctcgaacctctcggtctggttgaggaaggcgctaagacggctcctggaaagaagagaccggtagagccatcaccccagcgttctccagactcctctacgggcatcggcaagaagggccaacagcccgccagaaaaagactcaattttggtcagactggcgactcagagtcagttccagaccctcaacctctcggagaacctccagcagcgccctctggtgtgggacctaatacaatggctgcaggcggtggcgcaccaatggcagacaataacgaaggcgccgacggagtgggtagttcctcgggaaattggcattgcgattccacatggctgggcgacagagtcatcaccaccagcacccgaacctgggccctgcccacctacaacaaccacctctacaagcaaatctccaacgggacatcgggaggagccaccaacgacaacacctacttcggctacagcaccccctgggggtattttgactttaacagattccactgccacttttcaccacgtgactggcagcgactcatcaacaacaactggggattccggcccaagagactcagcttcaagctcttcaacatccaggtcaaggcggtcacgcagaatgaaggcaccaagaccatcgccaataacctcaccagcaccatccaggtgtttacggactcggagtaccagctgccgtacgttctcggctctgcccaccagggctgcctgcctccgttcccggcggacgtgttcacgattccccagtacggctacctaacactcaacaacggtagtcaggccgtgggacgctcctccttctactgcctggaatactttccttcgcagatgctgagaaccggcaacaacttccagtttacttacaccttcgaggacgtgcctttccacagcagctacgcccacagccagagcttggaccggctgatgaatcctctgattgaccagtacctgtactacttgtctcggattcaaacaacaggaggcacggcaaatacgcagactctgggcttcagccaaggtgggcctaatacaatggccaatcaggcaaagaactggctgccaggaccctgttaccgccaacaacgcgtctcaacgacaaccgggcaaaacaacaatagcaactttgcctggactgctgggaccaaataccatctgaatggaagaaattcattggctaatcctagcatcgctatggcaacacacaaagacgacgaggagcgtttttttcccagtaacgggatcctgatttttggcaaacaaaatgctgccagagacaatgcggattacagcgatgtcatgcccaccagcgaggaagaaatcaaaaccactaaccctgtggccacagaggaatacggtatcgtggcagataacttgcagcagcaaaacacggctcctcaaattggaactgtcaacagccagggggccttacccggtatggtctggcagaaccgggacgtgtacctgcagggtcccatctgggccaagattcctcacacggacggcaacttccacccgtctccgctgatgggcggctttggcctgaaacatcctccgcctcagatcctgatcaagaacacgcctgtacctgcggatcctccgaccaccttcaaccagtcaaagctgaactctttcatcacgcaatacagcaccggacaggtcagcgtggaaattgaatgggagctgcagaaggaaaacagcaagcgctggaaccccgagatccagtacacctccaactactacaaatctacaagtgtggactttgctgttaatacagaaggcgtgtactctgaaccccgccccattggcacccgttacctcacccgtaatctgtaa

SEQ ID NO: 12419 - DNA, 2217 bp, Artificial Sequence
  source: /note="Description of Artificial Sequence: Synthetic polynucleotide"
atggctgccgatggttatcttccagattggctcgaggacaacctctctgagggcattcgcgagtggtgggcgctgaaacctggagccccgaagcccaaagccaaccagcaaaagcaggacgacggccggggtctggtgcttcctggctacaagtacctcggacccttcaacggactcgacaagggggagcccgtcaacgcggcggacgcggcggccctcgagcacgacaaggcctacgaccagcagctgcaggcgggtgacaatccgtacctgcggtataaccacgccgacgccgagtttcaggagcgtctgcaagaagatacgtcttttgggggcaacctcgggcgagcagtcttccaggccaagaagcgggttctcgaacctctcggtctggttgaggaaggcgctaagacggctcctggaaagaagagaccggtagagccatcaccccagcgttctccagactcctctacgggcatcggcaagaagggccaacagcccgccagaaaaagactcaattttggtcagactggcgactcagagtcagttccagaccctcaacctctcggagaacctccagcagcgccctctggtgtgggacctaatacaatggctgcaggcggtggcgcaccaatggcagacaataacgaaggcgccgacggagtgggtagttcctcgggaaattggcattgcgattccacatggctgggcgacagagtcatcaccaccagcacccgaacctgggccctgcccacctacaacaaccacctctacaagcaaatctccaacgggacatcgggaggagccaccaacgacaacacctacttcggctacagcaccccctgggggtattttgactttaacagattccactgccacttttcaccacgtgactggcagcgactcatcaacaacaactggggattccggcccaagagactcagcttcaagctcttcaacatccaggtcaaggaggtcacgcagaatgaaggcaccaagaccatcgccaataacctcaccagcaccatccaggtgtttacggactcggagtaccagctgccgtacgttctcggctctgcccaccagggctgcctgcctccgttcccggcggacgtgttcacgattccccagtacggctacctaacactcaacaacggtagtcaggccgtgggacgctcctccttctactgcctggaatactttccttcgcagatgctgagaaccggcaacaacttccagtttacttacaccttcgaggacgtgcctttccacagcagctacgcccacagccagagcttggaccggctgatgaatcctctgattgaccagtacctgtactacttgtctcggattcaaacaacaggaggcacggcaaatacgcagactctgggcttcagccaaggtgggcctaatacaatggccaatcaggcaaagaactggctgccaggaccctgttaccgccaacaacgcgtctcaacgacaaccgggcaaaacaacaatagcaactttgcctggactgctgggaccaaataccatctgaatggaagaaattcattggctaatcctggcatcgctatggcaacacacaaagacgacgaggagcgtttttttcccagtaacgggatcctgatttttggcaaacaaaatgctgccagagacaatgcggattacagcgatgtcatgcccaccagcgaggaagaaatcaaaaccactaaccctgtggccacagaggaatacgatatcgtggcagataacttgcagcagcaaaacacggctcctcaaattggaactgtcaacagccagggggccttacccggtatggtctggcagaaccgggacgtgtacctgcagggtcccatctgggccaagattcctcacacggacggcaacttccacccgtctccgctgatgggcggctttggcctgaaacatcctccgcctcagatcctgatcaagaacacgcctgtacctgcggatcctccgaccaccttcaaccagtcaaagctgaactctttcatcacgcaatacagcaccggacaggtcagcgtggaaattgaatgggagctgcagaaggaaaacagcaagcgctggaaccccgagatccagtacacctccaactactacaaatctacaagtgtggactttgctgttaatacagaaggcgtgtactctgaaccccgccccattggcacccgttacctcacccgtaatctgtaa

SEQ ID NO: 12420 - DNA, 2217 bp, Artificial Sequence
  source: /note="Description of Artificial Sequence: Synthetic polynucleotide"
atggctgccgatggttatcttccagattggctcgaggacaacctctctgagggcattcgcgagtggtgggcgctgaaacctggagccccgaagcccaaagccaaccagcaaaagcaggacgacggccggggtctggtgcttcctggctacaagtacctcggacccttcaacggactcgacaagggggagcccgtcaacgcggcggacgcggcggccctcgagcacgacaaggcctacgaccagcagctgcaggcgggtgacaatccgtacctgcggtataaccacgccgacgccgagtttcaggagcgtctgcaagaagatacgtcttttgggggcaacctcgggcgagcagtcttccaggccaagaagcgggttctcgaacctctcggtctggttgaggaaggcgctaagacggctcctggaaagaagagaccggtagagccatcaccccagcgttctccagactcctctacgggcatcggcaagaagggccaacagcccgccagaaaaagactcaattttggtcagactggcgactcagagtcagttccagaccctcaacctctcggagaacctccagcagcgccctctggtgtgggacctaatacaatggctgcaggcggtggcgcaccaatggcagacaataacgaaggcgccgacggagtgggtagttcctcgggaaattggcattgcgattccacatggctgggcgacagagtcatcaccaccagcacccgaacctgggccctgcccacctacaacaaccacctctacaagcaaatctccaacgggacatcgggaggagccaccaacgacaacacctacttcggctacagcaccccctgggggtattttgactttaacagattccactgccacttttcaccacgtgactggcagcgactcatcaacaacaactggggattccggcccaagagactcagcttcaagctcttcaacatccaggtcaaggaggtcacgcagaatgaaggcaccaagaccatcgccaataacctcaccagcaccatccaggtgtttacggactcggagtaccagctgccgtacgttctcggctctgcccaccagggctgcctgcctccgttcccggcggacgtgttcacgattccccagtacggctacctaacactcaacaacggtagtcaggccgtgggacgctcctccttctactgcctggaatactttccttcgcagatgctgagaaccggcaacaacttccagtttacttacaccttcgaggacgtgcctttccacagcagctacgcccacagccagagcttggaccggctgatgaatcctctgattgaccagtacctgtactacttgtctcggattcaaacaacaggaggcacggcaaatacgcagactccgggcttcagccaaggtgggcctaatacaatggccaatcaggcaaagaactggctgccaggaccctgttaccgccaacaacgcgtctcaacgacaaccgggcaaaacaacaatagcaactttgcctggactgctgggaccaaataccatctgaatggaagaaattcattggctaatcctggcatcgctatggcaacacacaaagacgacgaggagcgtttttttcccagtaacgggatcctgatttttggcaaacaaaatgctgccagagacaatgcggattacagcgatgtcatgcccaccagcgaggaagaaatcaaaaccactaaccctgtggccacagaggaatacggtatcgtggcagataacttgcagcagcaaaacacggctcctcaaattggaactgtcaacagccagggggccttacccggtatggtctggcagaaccgggacgtgtacctgcagggtcccatctgggccaagattcctcacacggacggcaacttccacccgtctccgctgatgggcggctttggcctgaaacatcctccgcctcagatcctgatcaagaacacgcctgtacctgcggatcctccgaccaccttcaaccagtcaaagctgaactctttcatcacgcaatacagcaccggacaggtcagcgtggaaattgaatgggagctgcagaaggaaaacagcaagcgctggaaccccgagatccagtacacctccaactactacaaatctacaagtgtggactttgctgttaatacagaaggcgtgtactctgaaccccgccccattggcacccgttacctcacccgtaatctgtaa

SEQ ID NO: 12421 - DNA, 2217 bp, Artificial Sequence
  source: /note="Description of Artificial Sequence: Synthetic polynucleotide"
atggctgccgatggttatcttccagattggctcgaggacaacctctctgagggcattcgcgagtggtgggcgctgaaacctggagccccgaagcccaaagccaaccagcaaaagcaggacgacggccggggtctggtgcttcctggctacaagtacctcggacccttcaacggactcgacaagggggagcccgtcaacgcggcggacgcggcggccctcgagcacgacaaggcctacgaccagcagctgcaggcgggtgacaatccgtacctgcggtataaccacgccgacgccgagtttcaggagcgtctgcaagaagatacgtcttttgggggcaacctcgggcgagcagtcttccaggccaagaagcgggttctcgaacctctcggtctggttgaggaaggcgctaagacggctcctggaaagaagagaccggtagagccatcaccccagcgttctccagactcctctacgggcatcggcaagaagggccaacagcccgccagaaaaagactcaattttggtcagactggcgactcagagtcagttccagaccctcaacctctcggagaacctccagcagcgccctctggtgtgggacctaatacaatggctgcaggcggtggcgcaccaatggcagacaataacgaaggcgccgacggagtgggtagttcctcgggaaattggcattgcgattccacatggctgggcgacagagtcatcaccaccagcacccgaacctgggccctgcccacctacaacaaccacctctacaagcaaatctccaacgggacatcgggaggagccaccaacgacaacacctacttcggctacagcaccccctgggggtattttgactttaacagattccactgccacttttcaccacgtgactggcagcgactcatcaacaacaactggggattccggcccaagagactcagcttcaagctcttcaacatccaggtcaaggaggtcacgcagaatgaaggcaccaagaccatcgccaataacctcaccagcaccatccaggtgtttacggactcggagtaccagctgccgtacgttctcggctctgcccaccagggctgcctgcctccgttcccggcggacgtgttcacgattccccagtacggctacctaacactcaacaacggtagtcaggccgtgggacgctcctcctcctactgcctggaatactttccttcgcagatgctgagaaccggcaacaacttccagtttacttacaccttcgaggacgtgcctttccacagcagctacgcccacagccagagcttggaccggctgatgaatcctctgattgaccagtacctgtactacttgtctcggattcaaacaacaggaggcacggcaaatacgcagactctgggcttcagccaaggtgggcctaatacaatggccaatcaggcaaagaactggctgccaggaccctgttaccgccaacaacgcgtctcaacgacaaccgggcaaaacaacaatagcaactttgcctggactgctgggaccaaataccatctgaatggaagaaattcattggctaatcctggcatcgctatggcaacacacaaagacgacgaggagcgtttttttcccagtaacgggatcctgatttttggcaaacaaaatgctgccagagacaatgcggattacagcgatgtcatgcccaccagcgaggaagaaatcaaaaccactaaccctgtggccacagaggaatacggtatcgtggcagataacttgcagcagcaaaacacggctcctcaaattggaactgtcaacagccagggggccttacccggtatggtctggcagaaccgggacgtgtacctgcagggtcccatctgggccaagattcctcacacggacggcaacttccacccgtctccgctgatgggcggctttggcctgaaacatcctccgcctcagatcctgatcaagaacacgcctgtacctgcggatcctccgaccaccttcaaccagtcaaagctgaactctttcatcacgcaatacagcaccggacaggtcagcgtggaaattgaatgggagctgcagaaggaaaacagcaagcgctggaaccccgagatccagtacacctccaactactacaaatctacaagtgtggactttgctgttaatacagaaggcgtgtactctgaaccccgccccattggcacccgttacctcacccgtaatctgtaa

SEQ ID NO: 12422 - DNA, 2217 bp, Artificial Sequence
  source: /note="Description of Artificial Sequence: Synthetic polynucleotide"
atggctgccgatggttatcttccagattggctcgaggacaacctctctgagggcattcgcgagtggtgggcgctgaaacctggagccccgaagcccaaagccaaccagcaaaagcaggacgacggccggggtctggtgcttcctggctacaagtacctcggacccttcaacggactcgacaagggggagcccgtcaacgcggcggacgcggcggccctcgagcacgacaaggcctacgaccagcagctgcaggcgggtgacaatccgtacctgcggtataaccacgccgacgccgagtttcaggagcgtctgcaagaagatacgtcttttgggggcaacctcgggcgagcagccttccaggccaagaagcgggttctcgaacctctcggtctggttgaggaaggcgctaagacggctcctggaaagaagagaccggtagagccatcaccccagcgttctccagactcctctacgggcatcggcaagaagggccaacagcccgccagaaaaagactcaattttggtcagactggcgactcagagtcagttccagaccctcaacctctcggagaacctccagcagcgccctctggtgtgggacctaatacaatggctgcaggcggtggcgcaccaatggcagacaataacgaaggcgccgacggagtgggtagttcctcgggaaattggcattgcgattccacatggctgggcgacagagtcatcaccaccagcacccgaacctgggccctgcccacctacaacaaccacctctacaagcaaatctccaacgggacatcgggaggagccaccaacgacaacacctacttcggctacagcaccccctgggggtattttgactttaacagattccactgccacttttcaccacgtgactggcagcgactcatcaacaacaactggggattccggcccaagagactcagcttcaagctcttcaacatccaggtcaaggaggtcacgcagaatgaaggcaccaagaccatcgccaataacctcaccagcaccatccaggtgtttacggactcggagtaccagctgccgtacgttctcggctctgcccaccagggctgcctgcctccgttcccggcggacgtgttcacgattccccagtacggctacctaacactcaacaacggtagtcaggccgtgggacgctcctccttctactgcctggaatactttccttcgcagatgctgagaaccggcaacaacttccagtttacttacaccttcgaggacgtgcctttccacagcagctacgcccacagccagagcttggaccggctgatgaatcctctgattgaccagtacctgtactacttgtctcggattcaaacaacaggaggcacggcaaatacgcagactctgggcttcagccaaggtgggcctaatacaatggccaatcaggcaaagaactggctgccaggaccctgttaccgccaacaacgcgtctcaacgacaaccgggcaaaacaacaatagcaactttgcctggactgctgggaccaaataccatctgaatggaagaaattcattggctaatcctggcatcgctatggcaacacacaaagacgacgaggagcgtttttttcccagtaacgggatcctgatttttggcaaacaaaatgctgccagagacaatgcggattacagcgatgtcatgcccaccagcgaggaagaaatcaaaaccactaaccctgtggccacagaggaatacggtatcgtggcagataacttgcagcagcaaaacacggctcctcaaattggaactgtcaacagccagggggccttacccggtatggtctggcagaaccgggacgtgtacctgcagggtcccatctgggccaagattcctcacacggacggcaacttccacccgtctccgctgatgggcggctttggcctgaaacatcctccgcctcagatcctgatcaagaacacgcctgtacctgcggatcctccgaccaccttcaaccagtcaaagctgaactctttcatcacgcaatacagcaccggacaggtcagcgtggaaattgaatgggagctgcagaaggaaaacagcaagcgctggaaccccgagatccagtacacctccaactactacaaatctacaagtgtggactttgctgttaatacagaaggcgtgtactctgaaccccgccccattggcacccgttacctcacccgtaatctgtaa

SEQ ID NO: 12423 - DNA, 2217 bp, Artificial Sequence
  source: /note="Description of Artificial Sequence: Synthetic polynucleotide"
atggctgccgatggttatcttccagattggctcgaggacaacctctctgagggcattcgcgagtggtgggcgctgaaacctggagccccgaagcccaaagccaaccagcaaaagcaggacgacggccggggtctggtgcttcctggctacaagtacctcggacccttcaacggactcgacaagggggagcccgtcaacgcggcggacgcggcggccctcgagcacgacaaggcctacgaccagcagctgcaggcgggtgacaatccgtacctgcggtataaccacgccgacgccgagtttcaggagcgtctgcaagaagatacgtcttttgggggcaacctcgggcgagcagtcttccaggccaagaagcgggttctcgaacctctcggtctggttgaggaaggcgctaagacggctcctggaaagaagagaccggtagagccatcaccccagcgttctccagactcctctacgggcatcggcaagaagggccaacagcccgccagaaaaagactcaattttggtcagactggcgactcagagtcagttccagaccctcaacctctcggagaacctccagcagcgccctctggtgtgggacctaatacaatggctgcaggcggtggcgcaccaatggcagacaataacgaaggcgccgacggagtgggtagttcctcgggaaattggcattgcgattccacatggctgggcgacagagtcatcaccaccagcacccgaacctgggccctgcccacctacaacaaccacctctacaagcaaatctccaacgggacatcgggaggagccaccgacgacaacacctacttcggctacagcaccccctgggggtattttgactttaacagattccactgccacttttcaccacgtgactggcagcgactcatcaacaacaactggggattccggcccaagagactcagcttcaagctcttcaacatccaggtcaaggaggtcacgcagaatgaaggcaccaagaccatcgccaataacctcaccagcaccatccaggtgtttacggactcggagtaccagctgccgtacgttctcggctctgcccaccagggctgcctgcctccgttcccggcggacgtgttcacgattccccagtacggctacctaacactcaacaacggtagtcaggccgtgggacgctcctccttctactgcctggaatactttccttcgcagatgctgagaaccggcaacaacttccagtttacttacaccttcgaggacgtgcctttccacagcagctacgcccacagccagagcttggaccggctgatgaatcctctgattgaccagtacctgtactacttgtctcggattcaaacaacaggaggcacggcaaatacgcagactctgggcttcagccaaggtgggcctaatacaatggccaatcaggcaaagaactggctgccaggaccctgttaccgccaacaacgcgtctcaacgacaaccgggcaaaacaacaatagcaactttgcctggactgctgggaccaaataccatctgaatggaagaaattcattggctaatcctggcatcgctatggcaacacacaaagacgacgaggagcgtttttttcccagtaacgggatcctgatttttggcaaacaaaatgctgccagagacaatgcggattacagcgatgtcatgcccaccagcgaggaagaaatcaaaaccactaaccctgtggccacagaggaatacggtatcgtggcagataacttgcagcagcaaaacacggctcctcaaattggaactgtcaacagccagggggccttacccggtatggtctggcagaaccgggacgtgtacctgcagggtcccatctgggccaagattcctcacacggacggcaacttccacccgtctccgctgatgggcggctttggcctgaaacatcctccgcctcagatcctgatcaagaacacgcctgtacctgcggatcctccgaccaccttcaaccagtcaaagctgaactctttcatcacgcaatacagcaccggacaggtcagcgtggaaattgaatgggagctgcagaaggaaaacagcaagcgctggaaccccgagatccagtacacctccaactactacaaatctacaagtgtggactttgctgttaatacagaaggcgtgtactctgaaccccgccccattggcacccgttacctcacccgtaatctgtaa

SEQ ID NO: 12424 - DNA, 2217 bp, Artificial Sequence
  source: /note="Description of Artificial Sequence: Synthetic polynucleotide"
atggctgccgatggttatcttccagattggctcgaggacaacctctctgagggcattcgcgagtggtgggcgctgaaacctggagccccgaagcccaaagccaaccagcaaaagcaggacgacggccggggtctggtgcttcctggctacaagtacctcggacccttcaacggactcgacaagggggagcccgtcaacgcggcggacgcggcggccctcgagcacgacaaggcctacgaccagcagctgcaggcgggtgacaatccgtacctgcggtataaccacgccgacgccgagtttcaggagcgtctgcaagaagatacgtcttttgggggcaacctcgggcgagcagtcttccaggccaagaagcgggttctcgaacctctcggtctggttgaggaaggcgctaagacggctcctggaaagaagagaccggtagagccatcaccccagcgttctccagactcctctacgggcatcggcaagaagggccaacagcccgccagaaaaagactcaattttggtcagactggcgactcagagtcagttccagaccctcaacctctcggagaacctccagcagcgccctctggtgtgggacctaatacaatggctgcaggcggtggcgcaccaatggcagacaataacgaaggcgccgacggagtgggtagttcctcgggaaattggcattgcgattccacatggctgggcgacagagtcatcaccaccagcacccgaacctgggccctgcccacctacaacaaccacctctacaagcaaatctccaacgggacatcgggaggagccaccaacgacaacacctacttcggctacagcaccccctgggggtattttgactttaacagattccactgccacttttcaccacgtgactggcagcgactcatcaacaacaactggggattccggcccaagagactcagcttcaagctcttcaacatccaggtcaaggaggtcacgcagaatgaaggcaccaagaccatcgccaataacctcaccagcaccatccaggtgtttacggactcggagtaccagctgccgtacgttctcggctctgcccaccagggctgcctgcctccgttcccggcggacgtgttcacgattccccagtacggctacctaacactcaacaacggtagtcaggccgtgggacgctcctccttctactgcctggaatactttccttcgcagatgctgagaaccggcaacaacttccagtttacttacaccttcgaggacgtgcctttccacagcagctacgcccacagccagagcttggaccggctgatgaatcctctgattgaccagtacctgtactacttgtctcggattcaaacaacaggaggcacggcaaatacgcagactctgggcttcagccaaggtgggcctaatacaatggccaatcaggcaaagaactggctgccaggaccctgttaccgccaacaacgcgtctcaacgacaaccgggcaaaacaacaatagcaactttgcctggactgctgggaccaaataccatctgaatggaagaaattcattggctaatcctggcatcgctatggcaacacacaaagacgacgaggagcgtttttttcccagtaacgggatcctgatttttggcaaacaaaatgctaccagagacaatgcggattacagcgatgtcatgcccaccagcgaggaagaaatcaaaaccactaaccctgtggccacagaggaatacggtatcgtggcagataacttgcagcagcaaaacacggctcctcaaattggaactgtcaacagccagggggccttacccggtatggtctggcagaaccgggacgtgtacctgcagggtcccatctgggccaagattcctcacacggacggcaacttccacccgtctccgctgatgggcggctttggcctgaaacatcctccgcctcagatcctgatcaagaacacgcctgtacctgcggatcctccgaccaccttcaaccagtcaaagctgaactctttcatcacgcaatacagcaccggacaggtcagcgtggaaattgaatgggagctgcagaaggaaaacagcaagcgctggaaccccgagatccagtacacctccaactactacaaatctacaagtgtggactttgctgttaatacagaaggcgtgtactctgaaccccgccccattggcacccgttacctcacccgtaatctgtaa

SEQ ID NO: 12425 - DNA, 2217 bp, Artificial Sequence
  source: /note="Description of Artificial Sequence: Synthetic polynucleotide"
atggctgccgatggttatcttccagattggctcgaggacaacctctctgagggcattcgcgagtggtgggcgctgaaacctggagccccgaagcccaaagccaaccagcaaaagcaggacgacggccggggtctggtgcttcctggctacaagtacctcggacccttcaacggactcgacaagggggagcccgtcaacgcggcggacgcggcggccctcgagcacgacaaggcctacgaccagcagctgcaggcgggtgacaatccgtacctgcggtataaccacgccgacgccgagtttcaggagcgtctgcaagaagatacgtcttttgggggcaacctcgggcgagcagtcttccaggccaagaagcgggttctcgaacctctcggtctggttgaggaaggcgctaagacggctcctggaaagaagagaccggtagagccatcaccccagcgttctccagactcctctacgggcatcggcaagaagggccaacagcccgccagaaaaagactcaattttggtcagactggcgactcagagtcagttccagaccctcaacctctcggagaacctccagcagcgccctctggtgtgggacctaatacaatggctgcaggcggtggcgcaccaatggcagacaataacgaaggcgccgacggagtgggtagttcctcgggaaattggcattgcgattccacatggctgggcgacagagtcatcaccaccagcacccgaacctgggccctgcccacctacaacaaccacctctacaagcaaatctccaacgggacatcgggaggagccaccaacgacaacacctacttcggctacagcaccccctgggggtattttgactttaacagattccactgccacttttcaccacgtgactggcagcgactcatcaacaacaactggggattccggcccaagagactcagcttcaagctcttcaacatccaggtcaaggaggtcacgcagaatgaaggcaccaagaccatcgccaataacctcaccagcaccatccaggtgtttacggactcggagtaccagctgccgtacgttctcggctctgcccaccagggctgcctgcctccgttcccggcggacgtgttcacgattccccagtacggctacctaacactcaacaacggtagtcaggccgtgggacgctcctccttctactgcctggaatactttccttcgcagatgctgagaaccggcaacaacttccagtttacttacaccttcgaggacgtgcctttccacagcagctacgcccacagccagagcttggaccggctgatgaatcctctgattgaccagtacctgtactacttgtctcggattcaaacaacaggaggcacggcaaatacgcagactctgggcttcagccaaggtgggcctaatacaatggccaatcaggcaaagaactggctgccaggaccctgttaccgccaacaacgcgtctcaacgacaaccgggcaaaacaacaatagcaactttgcctggactgctgggaccaaataccatctgaatggaagaaattcattggctaatcctggcatcgctatggcaacacacaaagacgacgaggagcgtttttttcccagtaacgggatcctgatttttggcaaacaaaatgctgccagagacaatgcggattacagcgatgtcatgcccaccagcgaggaagaaatcaaaaccactaaccctgtggccacagaggaacacggtatcgtggcagataacttgcagcagcaaaacacggctcctcaaattggaactgtcaacagccagggggccttacccggtatggtctggcagaaccgggacgtgtacctgcagggtcccatctgggccaagattcctcacacggacggcaacttccacccgtctccgctgatgggcggctttggcctgaaacatcctccgcctcagatcctgatcaagaacacgcctgtacctgcggatcctccgaccaccttcaaccagtcaaagctgaactctttcatcacgcaatacagcaccggacaggtcagcgtggaaattgaatgggagctgcagaaggaaaacagcaagcgctggaaccccgagatccagtacacctccaactactacaaatctacaagtgtggactttgctgttaatacagaaggcgtgtactctgaaccccgccccattggcacccgttacctcacccgtaatctgtaa

SEQ ID NO: 12426 - DNA, 2217 bp, Artificial Sequence
  source: /note="Description of Artificial Sequence: Synthetic polynucleotide"
atggctgccgatggttatcttccagattggctcgaggacaacctctctgagggcattcgcgagtggtgggcgctgaaacctggagccccgaagcccaaagccaaccagcaaaagcaggacgacggccggggtctggtgcttcctggctacaagtacctcggacccttcaacggactcgacaagggggagcccgtcaacgcggcggacgcggcggccctcgagcacgacaaggcctacgaccagcagctgcaggcgggtgacaatccgtacctgcggtataaccacgccgacgccgagtttcaggagcgtctgcaagaagatacgtcttttgggggcaacctcgggcgagcagtcttccaggccaagaagcgggttctcgaacctctcggtctggttgaggaaggcgctaagacggctcctggaaagaagagaccggtagagccatcaccccagcgttctccagactcctctacgggcatcggcaagaagggccaacagcccgccagaaaaagactcaattttggtcagactggcgactcagagtcagttccagaccctcaacctctcggagaacctccagcagcgccctctggtgtgggacctaatacaatggctgcaggcggtggcgcaccaatggcagacaataacgaaggcgccgacggagtgggtagttcctcgggaaattggcattgcgattccacatggctgggcgacagagtcatcaccaccagcacccgaacctgggccctgcccacctacaacaaccacctctacaagcaaatctccaacgggacatcgggaggagccaccaacgacaacacctacttcggctacagcaccccctgggggtattttgactttaacagattccactgccacttttcaccacgtgactggcagcgactcatcaacaacaactggggattccggcccaagagactcagcttcaagctcttcaacatccaggtcaaggaggtcacgcagaatgaaggcaccaagaccatcgccaataacctcaccagcaccatccaggtgtttacggactcggagtaccagctgccgtacgttctcggctctgcccaccagggctgcctgcctccgttcccggcggacgtgttcacgattccccagtacggctacctaacactcaacaacggtagtcaggccgtgggacgctcctccttctactgcctggaatactttccttcgcagatgctgagaaccggcaacaacttccagtttacttacaccttcgaggacgtgcctttccacagcagctacgcccgcagccagagcttggaccggctgatgaatcctctgattgaccagtacctgtactacttgtctcggattcaaacaacaggaggcacggcaaatacgcagactctgggcttcagccaaggtgggcctaatacaatggccaatcaggcaaagaactggctgccaggaccctgttaccgccaacaacgcgtctcaacgacaaccgggcaaaacaacaatagcaactttgcctggactgctgggaccaaataccatctgaatggaagaaattcattggctaatcctggcatcgctatggcaacacacaaagacgacgaggagcgtttttttcccagtaacgggatcctgatttttggcaaacaaaatgctgccagagacaatgcggattacagcgatgtcatgcccaccagcgaggaagaaatcaaaaccactaaccctgtggccacagaggaatacggtatcgtggcagataacttgcagcagcaaaacacggctcctcaaattggaactgtcaacagccagggggccttacccggtatggtctggcagaaccgggacgtgtacctgcagggtcccatctgggccaagattcctcacacggacggcaacttccacccgtctccgctgatgggcggctttggcctgaaacatcctccgcctcagatcctgatcaagaacacgcctgtacctgcggatcctccgaccaccttcaaccagtcaaagctgaactctttcatcacgcaatacagcaccggacaggtcagcgtggaaattgaatgggagctgcagaaggaaaacagcaagcgctggaaccccgagatccagtacacctccaactactacaaatctacaagtgtggactttgctgttaatacagaaggcgtgtactctgaaccccgccccattggcacccgttacctcacccgtaatctgtaa

SEQ ID NO: 12427 - DNA, 2217 bp, Artificial Sequence
  source: /note="Description of Artificial Sequence: Synthetic polynucleotide"
atggctgccgatggttatcttccagattggctcgaggacaacctctctgagggcattcgcgagtggtgggcgctgaaacctggagccccgaagcccaaagccaaccagcaaaagcaggacgacggccggggtctggtgcttcctggctacaagtacctcggacccttcaacggactcgacaagggggagcccgtcaacgcggcggacgcggcggccctcgagcacgacaaggcctacgaccagcagctgcaggcgggtgacaatccgtacctgcggtataaccacgccgacgccgagtttcaggagcgtctgcaagaagatacgtcttttgggggcaacctcgggcgagcagtcttccaggccaagaagcgggttctcgaacctctcggtctggttgaggaaggcgctaagacggctcctggaaagaagagaccggtagagccatcaccccagcgttctccagactcctctacgggcatcggcaagaagggccaacagcccgccagaaaaagactcaattttggtcagactggcgactcagagtcagttccagaccctcaacctctcggagaacctccagcagcgccctctggtgtgggacctaatacaatggctgcaggcggtggcgcaccaatggcagacaataacgaaggcgccgacggagtgggtagttcctcgggaaattggcattgcgattccacatggctgggcgacagagtcatcaccaccagcacccgaacctgggccctgcccacctacaacaaccacctctacaagcaaatctccaacgggacatcgggaggagccaccaacgacaacacctacttcggctacagcaccccctgggggtattttgactttaacagattccactgccacttttcaccacgtgactggcagcgactcatcaacaacaactggggattccggcccaagagactcagcttcaagctcttcaacatccaggtcaaggaggtcacgcagaatgaaggcaccaagaccatcgccaataacctcaccagcaccatccaggtgtttacggactcggagtaccagctgccgtacgttctcggctctgcccaccagggctgcctgcctccgctcccggcggacgtgttcacgattccccagtacggctacctaacactcaacaacggtagtcaggccgtgggacgctcctccttctactgcctggaatactttccttcgcagatgctgagaaccggcaacaacttccagtttacttacaccttcgaggacgtgcctttccacagcagctacgcccacagccagagcttggaccggctgatgaatcctctgattgaccagtacctgtactacttgtctcggattcaaacaacaggaggcacggcaaatacgcagactctgggcttcagccaaggtgggcctaatacaatggccaatcaggcaaagaactggctgccaggaccctgttaccgccaacaacgcgtctcaacgacaaccgggcaaaacaacaatagcaactttgcctggactgctgggaccaaataccatctgaatggaagaaattcattggctaatcctggcatcgctatggcaacacacaaagacgacgaggagcgtttttttcccagtaacgggatcctgatttttggcaaacaaaatgctgccagagacaatgcggattacagcgatgtcatgcccaccagcgaggaagaaatcaaaaccactaaccctgtggccacagaggaatacggtatcgtggcagataacttgcagcagcaaaacacggctcctcaaattggaactgtcaacagccagggggccttacccggtatggtctggcagaaccgggacgtgtacctgcagggtcccatctgggccaagattcctcacacggacggcaacttccacccgtctccgctgatgggcggctttggcctgaaacatcctccgcctcagatcctgatcaagaacacgcctgtacctgcggatcctccgaccaccttcaaccagtcaaagctgaactctttcatcacgcaatacagcaccggacaggtcagcgtggaaattgaatgggagctgcagaaggaaaacagcaagcgctggaaccccgagatccagtacacctccaactactacaaatctacaagtgtggactttgctgttaatacagaaggcgtgtactctgaaccccgccccattggcacccgttacctcacccgtaatctgtaa

SEQ ID NO: 12428 - DNA, 2217 bp, Artificial Sequence
  source: /note="Description of Artificial Sequence: Synthetic polynucleotide"
atggctgccgatggttatcttccagattggctcgaggacaacctctctgagggcattcgcgagtggtgggcgctgaaacctggagccccgaagcccaaagccaaccagcaaaagcaggacgacggccggggtctggtgcttcctggctacaagtacctcggacccttcaacggactcgacaagggggagcccgtcaacgcggcggacgcggcggccctcgagcacgacaaggcctacgaccagcagctgcaggcgggtgacaatccgtacctgcggtataaccacgccgacgccgagtttcaggagcgtctgcaagaagatacgtcttttgggggcaacctcgggcgagcagtcttccaggccaagaagcgggttctcgaacctctcggtctggttgaggaaggcgctaagacggctcctggaaagaagagaccggtagagccatcaccccagcgttctccagactcctctacgggcatcggcaagaagggccaacagcccgccagaaaaagactcaattttggtcagactggcgactcagagtcagttccagaccctcaacctctcggagaacctccagcagcgccctctggtgtgggacctaatacaatggctgcaggcggtggcgcaccaatggcagacaataacgaaggcgccgacggagtgggtagttcctcgggaaattggcattgcgattccacatggctgggcgacagagtcatcaccaccagcacccgaacccgggccctgcccacctacaacaaccacctctacaagcaaatctccaacgggacatcgggaggagccaccaacgacaacacctacttcggctacagcaccccctgggggtattttgactttaacagattccactgccacttttcaccacgtgactggcagcgactcatcaacaacaactggggattccggcccaagagactcagcttcaagctcttcaacatccaggtcaaggaggtcacgcagaatgaaggcaccaagaccatcgccaataacctcaccagcaccatccaggtgtttacggactcggagtaccagctgccgtacgttctcggctctgcccaccagggctgcctgcctccgttcccggcggacgtgttcacgattccccagtacggctacctaacactcaacaacggtagtcaggccgtgggacgctcctccttctactgcctggaatactttccttcgcagatgctgagaaccggcaacaacttccagtttacttacaccttcgaggacgtgcctttccacagcagctacgcccacagccagagcttggaccggctgatgaatcctctgattgaccagtacctgtactacttgtctcggattcaaacaacaggaggcacggcaaatacgcagactctgggcttcagccaaggtgggcctaatacaatggccaatcaggcaaagaactggctgccaggaccctgttaccgccaacaacgcgtctcaacgacaaccgggcaaaacaacaatagcaactttgcctggactgctgggaccaaataccatctgaatggaagaaattcattggctaatcctggcatcgctatggcaacacacaaagacgacgaggagcgtttttttcccagtaacgggatcctgatttttggcaaacaaaatgctgccagagacaatgcggattacagcgatgtcatgcccaccagcgaggaagaaatcaaaaccactaaccctgtggccacagaggaatacggtatcgtggcagataacttgcagcagcaaaacacggctcctcaaattggaactgtcaacagccagggggccttacccggtatggtctggcagaaccgggacgtgtacctgcagggtcccatctgggccaagattcctcacacggacggcaacttccacccgtctccgctgatgggcggctttggcctgaaacatcctccgcctcagatcctgatcaagaacacgcctgtacctgcggatcctccgaccaccttcaaccagtcaaagctgaactctttcatcacgcaatacagcaccggacaggtcagcgtggaaattgaatgggagctgcagaaggaaaacagcaagcgctggaaccccgagatccagtacacctccaactactacaaatctacaagtgtggactttgctgttaatacagaaggcgtgtactctgaaccccgccccattggcacccgttacctcacccgtaatctgtaa

SEQ ID NO: 12429 - DNA, 2217 bp, Artificial Sequence
  source: /note="Description of Artificial Sequence: Synthetic polynucleotide"
atggctgccgatggttatcttccagattggctcgaggacaacctctctgagggcattcgcgagtggtgggcgctgaaacctggagccccgaagcccaaagccaaccagcaaaagcaggacgacggccggggtctggtgcttcctggctacaagtacctcggacccttcaacggactcgacaagggggagcccgtcaacgcggcggacgcggcggccctcgagcacgacaaggcctacgaccagcagctgcaggcgggtgacaatccgtacctgcggtataaccacgccgacgccgagtttcaggagcgtctgcaagaagatacgtcttttgggggcaacctcgggcgagcagtcttccaggccaagaagcgggttctcgaacctctcggtctggttgaggaaggcgctaagacggctcctggaaagaagagaccggtagagccatcaccccagcgttctccagactcctctacgggcatcggcaagaagggccaacagcccgccagaaaaagactcaattttggtcagactggcgactcagagtcagttccagaccctcaacctctcggagaacctccagcagcgccctctggtgtgggacctaatacaatggctgcaggcggtggcgcaccaatggcagacaataacgaaggcgccgacggagtgggtagttcctcgggaaattggcattgcgattccacatggctgggcgacagagtcatcaccaccagcacccgaacctgggccctgcccacctacaacaaccacctctacaagcaaatctccaacgggacatcgggaggagccaccaacgacaacacctacttcggctacagcaccccctgggggtattttgactttaacagattccactgccacttttcaccacgtgactggcagcgactcatcaacaacaactggggattccggcccaagagactcagcttcaagctcttcaacatccaggtcaaggaggtcacgcagaatgaaggcaccaagaccatcgccaataacctcaccagcaccatccaggtgtttacggactcggagtaccagctgccgtacgttctcggctctgcccaccagggctgcctgcctccgttcccggcggacgtgttcacgattccccagtacggctacctaacactcaacaacggtagtcaggccgtgggacgctcctccttctactgcctggaatactttccttcgcagatgctgagaaccggcaacaacttccagtttacttacaccttcgaggacgtgcctttccacagcagctacgcccacagccagagcttggaccggctgatgaatcctctgattgaccagtacctgtactacttgtctcggattcaaacaacaggaggcacggcaaatacgcagactctgggcttcagccaaggtgggcctaatacaatggccaatcaggcaaagaactggctgccaggaccctgttaccgccaacaacgcgtctcaacgacaaccgggcaaaacaacaatagcaactttgcctggactgctgggaccaaataccatctgaatggaagaaattcattggctaatcctggcatcgctatgacaacacacaaagacgacgaggagcgtttttttcccagtaacgggatcctgatttttggcaaacaaaatgctgccagagacaatgcggattacagcgatgtcatgcccaccagcgaggaagaaatcaaaaccactaaccctgtggccacagaggaatacggtatcgtggcagataacttgcagcagcaaaacacggctcctcaaattggaactgtcaacagccagggggccttacccggtatggtctggcagaaccgggacgtgtacctgcagggtcccatctgggccaagattcctcacacggacggcaacttccacccgtctccgctgatgggcggctttggcctgaaacatcctccgcctcagatcctgatcaagaacacgcctgtacctgcggatcctccgaccaccttcaaccagtcaaagctgaactctttcatcacgcaatacagcaccggacaggtcagcgtggaaattgaatgggagctgcagaaggaaaacagcaagcgctggaaccccgagatccagtacacctccaactactacaaatctacaagtgtggactttgctgttaatacagaaggcgtgtactctgaaccccgccccattggcacccgttacctcacccgtaatctgtaa

SEQ ID NO: 12430 - DNA, 2217 bp, Artificial Sequence
  source: /note="Description of Artificial Sequence: Synthetic polynucleotide"
atggctgccgatggttatcttccagattggctcgaggacaacctctctgagggcattcgcgagtggtgggcgctgaaacctggagccccgaagcccaaagccaaccagcaaaagcaggacgacggccggggtctggtgcttcctggctacaagtacctcggacccttcaacggactcgacaagggggagcccgtcaacgcggcggacgcggcggccctcgagcacgacaaggcctacgaccagcagctgcaggcgggtgacaatccgtacctgcggtataaccacgccgacgccgagtttcaggagcgtctgcaagaagatacgtcttttgggggcaacctcgggcgagcagtcttccaggccaagaagcgggttctcgaacctctcggtctggttgaggaaggcgctaagacggctcctggaaagaagagaccggtagagccatcaccccagcgttctccagactcctctacgggcatcggcaagaagggccaacagcccgccagaaaaagactcaattttggtcagactggcgactcagagtcagttccagaccctcaacctctcggagaacctccagcagcgccctctggtgtgggacctaatacaatggctgcaggcggtggcgcaccaatggcagacaataacgaaggcgccgacggagtgggtagttcctcgggaaattggcattgcgattccacatggctgggcgacagagtcatcaccaccagcacccgaacctgggccctgcccacctacaacaaccacctctacaagcaaatctccaacgggacatcgggaggagccaccaacgacaacacctacttcggctacagcaccccctgggggtattttgactttaacagattccactgccacttttcaccacgtgactggcagcgactcatcaacaacaactggggattccggcccaagagactcagcttcaagctcttcaacatccaggtcaaggaggtcacgcagaatgaaggcaccaagaccatcgccaataacctcaccagcaccatccaggtgtttacggactcggagtaccagctgccgtacgttctcggctctgcccaccagggctgcctgcctccgttcccggcggacgtgttcacgattccccagtacggctacctaacactcaacaacggtagtcaggccgtgggacgctcctccttctactgcctggaatactttccttcgcagatgctgagaaccggcaacaacttccagtttacttacaccttcgaggacgtgcctttccacagcagctacgcccacagccagagcttggaccggctgatgaatcctctgattgaccagtacctgtactacttgtctcggattcaaacaacaggaggcacggcaaatacgcagactctgggcttcagccaaggtgggcctaatacaatggccaatcaggcaaagaactggctgccaggaccctgttaccgccaacaacgcgtctcaacgacaaccgggcaaaacaacaatagcaactttgcctggactgctgggaccaaataccatctgaatggaagaaattcattggctaatcctggcatcgctatggcaacacacaaagacgacgaggagcgtttttttcccagtaacgggatcctgatttttggcaaacaaaatgctgccagagacaatgcggattacagcgatgtcatgcccaccagcgaggaagaaatcaaaaccactaaccctgtggccacagaggaatacggtatcgtggcagataacttgcagcagcaaaacacggctcctcaaattggaactgtcaacagccagggggtcttacccggtatggtctggcagaaccgggacgtgtacctgcagggtcccatctgggccaagattcctcacacggacggcaacttccacccgtctccgctgatgggcggctttggcctgaaacatcctccgcctcagatcctgatcaagaacacgcctgtacctgcggatcctccgaccaccttcaaccagtcaaagctgaactctttcatcacgcaatacagcaccggacaggtcagcgtggaaattgaatgggagctgcagaaggaaaacagcaagcgctggaaccccgagatccagtacacctccaactactacaaatctacaagtgtggactttgctgttaatacagaaggcgtgtactctgaaccccgccccattggcacccgttacctcacccgtaatctgtaa

SEQ ID NO: 12431 - DNA, 2217 bp, Artificial Sequence
  source: /note="Description of Artificial Sequence: Synthetic polynucleotide"
atggctgccgatggttatcttccagattggctcgaggacaacctctctgagggcattcgcgagtggtgggcgctgaaacctggagccccgaagcccaaagccaaccagcaaaagcaggacgacggccggggtctggtgcttcctggctacaagtacctcggacccttcaacggactcgacaagggggagcccgtcaacgcggcggacgcggcggccctcgagcacgacaaggcctacgaccagcagctgcaggcgggtgacaatccgtacctgcggtataaccacgccgacgccgagtttcaggagcgtctgcaagaagatacgtcttttgggggcaacctcgggcgagcagtcttccaggccaagaagcgggttctcgaacctctcggtctggttgaggaaggcgctaagacggctcctggaaagaagagaccggtagagccatcaccccagcgttctccagactcctctacgggcatcggcaagaagggccaacagcccgccagaaaaagactcaattttggtcagactggcgactcagagtcagttccagaccctcaacctctcggagaacctccagcagcgccctctggtgtgggacctaatacaatggctgcaggcggtggcgcaccaatggcagacaataacgaaggcgccgacggagtgggtagttcctcgggaaattggcattgcgattccacatggctgggcgacagagtcatcaccaccagcacccgaacctgggccctgcccacctacaacaaccacctctacaagcaaatctccaacgggacatcgggaggagccaccaacgacaacacctacttcggctacagcaccccctgggggtattttgactttaacagattccactgccacttttcaccacgtgactggcagcgactcgtcaacaacaactggggattccggcccaagagactcagcttcaagctcttcaacatccaggtcaaggaggtcacgcagaatgaaggcaccaagaccatcgccaataacctcaccagcaccatccaggtgtttacggactcggagtaccagctgccgtacgttctcggctctgcccaccagggctgcctgcctccgttcccggcggacgtgttcacgattccccagtacggctacctaacactcaacaacggtagtcaggccgtgggacgctcctccttctactgcctggaatactttccttcgcagatgctgagaaccggcaacaacttccagtttacttacaccttcgaggacgtgcctttccacagcagctacgcccacagccagagcttggaccggctgatgaatcctctgattgaccagtacctgtactacttgtctcggattcaaacaacaggaggcacggcaaatacgcagactctgggcttcagccaaggtgggcctaatacaatggccaatcaggcaaagaactggctgccaggaccctgttaccgccaacaacgcgtctcaacgacaaccgggcaaaacaacaatagcaactttgcctggactgctgggaccaaataccatctgaatggaagaaattcattggctaatcctggcatcgctatggcaacacacaaagacgacgaggagcgtttttttcccagtaacgggatcctgatttttggcaaacaaaatgctgccagagacaatgcggattacagcgatgtcatgcccaccagcgaggaagaaatcaaaaccactaaccctgtggccacagaggaatacggtatcgtggcrgataacttgcagcagcaaaacacggctcctcaaattggaactgtcaacagccagggggccttacccggtatggtctggcagaaccgggacgtgtacctgcagggtcccatctgggccaagattcctcacacggacggcaacttccacccgtctccgctgatgggcggctttggcctgaaacatcctccgcctcagatcctgatcaagaacacgcctgtacctgcggatcctccgaccaccttcaaccagtcaaagctgaactctttcatcacgcaatacagcaccggacaggtcagcgtggaaattgaatgggagctgcagaaggaaaacagcaagcgctggaaccccgagatccagtacacctccaactactacaaatctacaagtgtggactttgctgttaatacagaaggcgtgtactctgaaccccgccccattggcacccgttacctcacccgtaatctgtaa

SEQ ID NO: 12432 - DNA, 2217 bp, Artificial Sequence
  source: /note="Description of Artificial Sequence: Synthetic polynucleotide"
atggctgccgatggttatcttccagattggctcgaggacaacctctctgagggcattcgcgagtggtgggcgctgaaacctggagccccgaagcccaaagccaaccagcaaaagcaggacgacggccggggtctggtgcttcctggctacaagtacctcggacccttcaacggactcgacaagggggagcccgtcaacgcggcggacgcggcggccctcgagcacgacaaggcctacgaccagcagctgcaggcgggtgacaatccgtacctgcggtataaccacgccgacgccgagtttcgggagcgtctgcaagaagatacgtcttttgggggcaacctcgggcgagcagtcttccaggccaagaagcgggttctcgaacctctcggtctggttgaggaaggcgctaagacggctcctggaaagaagagaccggtagagccatcaccccagcgttctccagactcctctacgggcatcggcaagaagggccaacagcccgccagaaaaagactcaattttggtcagactggcgactcagagtcagttccagaccctcaacctctcggagaacctccagcagcgccctctggtgtgggacctaatacaatggctgcaggcggtggcgcaccaatggcagacaataacgaaggcgccgacggagtgggtagttcctcgggaaattggcattgcgattccacatggctgggcgacagagtcatcaccaccagcacccgaacctgggccctgcccacctacaacaaccacctctacaagcaaatctccaacgggacatcgggaggagccaccaacgacaacacctacttcggctacagcaccccctgggggtattttgactttaacagattccactgccacttttcaccacgtgactggcagcgactcatcaacaacaactggggattccggcccaagagactcagcttcaagctcttcaacatccaggtcaaggaggtcacgcagaatgaaggcaccaagaccatcgccaataacctcaccagcaccatccaggtgtttacggactcggagtaccagctgccgtacgttctcggctctgcccaccagggctgcctgcctccgttcccggcggacgtgttcacgattccccagtacggctacctaacactcaacaacggtagtcaggccgtgggacgctcctccttctactgcctggaatactttccttcgcagatgctgagaaccggcaacaacttccagtttacttacaccttcgaggacgtgcctttccacagcagctacgcccacagccagagcttggaccggctgatgaatcctctgattgaccagtacctgtactacttgtctcggattcaaacaacaggaggcacggcaaatacgcagactctgggcttcagccaaggtgggcctaatacaatggccaatcaggcaaagaactggctgccaggaccctgttaccgccaacaacgcgtctcaacgacaaccgggcaaaacaacaatagcaactttgcctggactgctgggaccaaataccatctgaatggaagaaattcattggctaatcctggcatcgctatggcaacacacaaagacgacgaggagcgtttttttcccagtaacgggatcctgatttttggcaaacaaaatgctgccagagacaatgcggattacagcgatgtcatgcccaccagcgaggaagaaatcaaaaccactaaccctgtggccacagaggaatacggtatcgtggcagataacttgcagcagcaaaacacggctcctcaaattggaactgtcaacagccagggggccttacccggtatggtctggcagaaccgggacgtgtacctgcagggtcccatctgggccaagattcctcacacggacggcaacttccacccgtctccgctgatgggcggctttggcctgaaacatcctccgcctcagatcctgatcaagaacacgcctgtacctgcggatcctccgaccaccttcaaccagtcaaagctgaactctttcatcacgcaatacagcaccggacaggtcagcgtggaaattgaatgggagctgcagaaggaaaacagcaagcgctggaaccccgagatccagtacacctccaactactacaaatctacaagtgtggactttgctgttaatacagaaggcgtgtactctgaaccccgccccattggcacccgttacctcacccgtaatctgtaa

SEQ ID NO: 12433 - DNA, 2217 bp, Artificial Sequence
  source: /note="Description of Artificial Sequence: Synthetic polynucleotide"
atggctgccgatggttatcttccagattggctcgaggacaacctctctgagggcattcgcgagtggtgggcgctgaaacctggagccccgaagcccaaagccaaccagcaaaagcaggacgacggccggggtctggtgcttcctggctacaagtacctcggacccttcaacggactcgacaagggggagcccgtcaacgcggcggacgcggcggccctcgagcacgacaaggcctacgaccagcagctgcaggcgggtgacaatccgtacctgcggtataaccacgccgacgccgagtttcaggagcgtctgcaagaagatacgtcttttgggggcaacctcgggcgagcagtcttccaggccaagaagcgggttctcgaacctctcggtctggttgaggaaggcgctaagacggctcctggaaagaagagaccggtagagccatcaccccagcgttctccagactcctctacgggcatcggcaagaagggccaacagcccgccagaaaaagactcaattttggtcagactggcgactcagagtcagttccagaccctcaacctctcggagaacctccagcagcgccctctggtgtgggacctaatacaatggctgcaggcggtggcgcaccaatggcagacaataacgaaggcgccgacggagtgggtagttcctcgggaaattggcattgcgattccacatggctgggcgacagagtcatcaccaccagcacccgaacctgggccctgcccacctacaacaaccacctctacaagcaaatctccaacgggacatcgggaggagccaccaacgacaacacctacttcggctacagcaccccctgggggtattttgactttaacagattccactgccacttttcaccacgtgactggcagcgactcatcaacaacaactggggattccggcccaagagactcagcttcaagctcttcaacatccaggtcaaggaggtcacgcagaatgaaggcaccaagaccatcgccaataacctcaccagcaccatccaggtgtttacggactcggagtaccagctgccgtacgttctcggctctgcccaccagggctgcctgcctccgttcccggcggacgtgttcacgattccccagtacggctacccaacactcaacaacggtagtcaggccgtgggacgctcctccttctactgcctggaatactttccttcgcagatgctgagaaccggcaacaacttccagtttacttacaccttcgaggacgtgcctttccacagcagctacgcccacagccagagcttggaccggctgatgaatcctctgattgaccagtacctgtactacttgtctcggattcaaacaacaggaggcacggcaaatacgcagactctgggcttcagccaaggtgggcctaatacaatggccaatcaggcaaagaactggctgccaggaccctgttaccgccaacaacgcgtctcaacgacaaccgggcaaaacaacaatagcaactttgcctggactgctgggaccaaataccatctgaatggaagaaattcattggctaatcctggcatcgctatggcaacacacaaagacgacgaggagcgtttttttcccagtaacgggatcctgatttttggcaaacaaaatgctgccagagacaatgcggattacagcgatgtcatgcccaccagcgaggaagaaatcaaaaccactaaccctgtggccacagaggaatacggtatcgtggcagataacttgcagcagcaaaacacggctcctcaaattggaactgtcaacagccagggggccttacccggtatggtctggcagaaccgggacgtgtacctgcagggtcccatctgggccaagattcctcacacggacggcaacttccacccgtctccgctgatgggcggctttggcctgaaacatcctccgcctcagatcctgatcaagaacacgcctgtacctgcggatcctccgaccaccttcaaccagtcaaagctgaactctttcatcacgcaatacagcaccggacaggtcagcgtggaaattgaatgggagctgcagaaggaaaacagcaagcgctggaaccccgagatccagtacacctccaactactacaaatctacaagtgtggactttgctgttaatacagaaggcgtgtactctgaaccccgccccattggcacccgttacctcacccgtaatctgtaa

SEQ ID NO: 12434 - DNA, 2217 bp, Artificial Sequence
  source: /note="Description of Artificial Sequence: Synthetic polynucleotide"
atggctgccgatggttatcttccagattggctcgaggacaacctctctgagggcattcgcgagtggtgggcgctgaaacctggagccccgaagcccaaagccaaccagcaaaagcaggacgacggccggggtctggtgcttcctggctacaagtacctcggacccttcaacggactcgacaagggggagcccgtcaacgcggcggacgcggcggccctcgagcacgacaaggcctacgaccagcagctgcaggcgggtgacaatccgtacctgcggtataaccacgccgacgccgagtttcaggagcgtctgcaagaagatacgtcttttgggggcaacctcgggcgagcagtcttccaggccaagaagcgggttctcgaacctctcggtctggttgaggaaggcgctaagacggctcctggaaagaagagaccggtagagccatcaccccagcgttctccagactcctctacgggcatcggcaagaagggccaacagcccgccagaaaaagactcaattttggtcagactggcgactcagagtcagttccagaccctcaacctctcggagaacctccagcagcgccctctggtgtgggacctaatacaatgactgcaggcggtggcgcaccaatggcagacaataacgaaggcgccgacggagtgggtagttcctcgggaaattggcattgcgattccacatggctgggcgacagagtcatcaccaccagcacccgaacctgggccctgcccacctacaacaaccacctctacaagcaaatctccaacgggacatcgggaggagccaccaacgacaacacctacttcggctacagcaccccctgggggtattttgactttaacagattccactgccacttttcaccacgtgactggcagcgactcatcaacaacaactggggattccggcccaagagactcagcttcaagctcttcaacatccaggtcaaggaggtcacgcagaatgaaggcaccaagaccatcgccaataacctcaccagcaccatccaggtgtttacggactcggagtaccagctgccgtacgttctcggctctgcccaccagggctgcctgcctccgttcccggcggacgtgttcacgattccccagtacggctacctaacactcaacaacggtagtcaggccgtgggacgctcctccttctactgcctggaatactttccttcgcagatgctgagaaccggcaacaacttccagtttacttacaccttcgaggacgtgcctttccacagcagctacgcccacagccagagcttggaccggctgatgaatcctctgattgaccagtacctgtactacttgtctcggattcaaacaacaggaggcacggcaaatacgcagactctgggcttcagccaaggtgggcctaatacaatggccaatcaggcaaagaactggctgccaggaccctgttaccgccaacaacgcgtctcaacgacaaccgggcaaaacaacaatagcaactttgcctggactgctgggaccaaataccatctgaatggaagaaattcattggctaatcctggcatcgctatggcaacacacaaagacgacgaggagcgtttttttcccagtaacgggatcctgatttttggcaaacaaaatgctgccagagacaatgcggattacagcgatgtcatgcccaccagcgaggaagaaatcaaaaccactaaccctgtggccacagaggaatacggtatcgtggcagataacttgcagcagcaaaacacggctcctcaaattggaactgtcaacagccagggggccttacccggtatggtctggcagaaccgggacgtgtacctgcagggtcccatctgggccaagattcctcacacggacggcaacttccacccgtctccgctgatgggcggctttggcctgaaacatcctccgcctcagatcctgatcaagaacacgcctgtacctgcggatcctccgaccaccttcaaccagtcaaagctgaactctttcatcacgcaatacagcaccggacaggtcagcgtggaaattgaatgggagctgcagaaggaaaacagcaagcgctggaaccccgagatccagtacacctccaactactacaaatctacaagtgtggactttgctgttaatacagaaggcgtgtactctgaaccccgccccattggcacccgttacctcacccgtaatctgtaa

SEQ ID NO: 12435 - DNA, 2217 bp, Artificial Sequence
  source: /note="Description of Artificial Sequence: Synthetic polynucleotide"
atggctgccgatggttatcttccagattggctcgaggacaacctctctgagggcattcgcgagtggtgggcgctgaaacctggagccccgaagcccaaagccaaccagcaaaagcaggacgacggccggggtctggtgcttcctggctacaagtacctcggacccttcaacggactcgacaagggggagcccgtcaacgcggcggacgcggcggccctcgagcacgacaaggcctacgaccagcagctgcaggcgggtgacaatccgtacctgcggtataaccacgccgacgccgagtttcaggagcgtctgcaagaagatacgtcttttgggggcaacctcgggcgagcagtcttccaggccaagaagcgggttctcgaacctctcggtctggttgaggaaggcgctaagacggctcctggaaagaagagaccggtagagccatcaccccagcgttctccagactcctctacgggcatcggcaagaagggccaacagcccgccagaaaaagactcaattttggtcagactggcgactcagagtcagttccagaccctcaacctctcggagaacctccagcagcgccctctggtgtgggacctaatacaatggctgcaggcggtggcgcaccaatggcagacaataacgaaggcgccgacggagtgggtagttcctcgggaaattggcattgcgattccacatggctgggcgacagagtcatcaccaccagcacccgaacctgggccctgcccacctacaacaaccacctctacaagcaaatctccaacgggacatcgggaggagccaccaacgacaacacctacttcggctacagcaccccctgggggtattttgactttaacagattccactgccacttttcaccacgtgactggcagcgactcatcaacaacaactggggattccggcccaagagactcagcttcaagctcttcaacatccaggtcaaggaggtcacgcagaatgaaggcaccaagaccatcgccaataacctcaccagcaccatccaggtgtttacggactcggagtaccagctgccgtacgttctcggctctgcccaccagggctgcctgcctccgttcccggcggacgtgttcacgattccccagtacggctacctaacactcaacaacggtagtcaggccgtgggacgctcctccttctactgcctggaatactttccttcgcagatgctgagaaccggcaacaacttccagtttacttacaccttcgaggacgtgcctttccacagcagctacgcccacagccagagcttggaccggctgatgaatcctctgattgaccagtacctgtactacttgtctcggattcaaacaacaggaggcacggcaaatacgcagactctgggcttcagccaaggtgggcctaatacaatggccaatcaggcaaagaactggctgccaggaccctgttaccgccaacaacgcgtctcaacgacaaccgggcaaaacaacaatagcaactttgcctggactgctgggaccaaataccatctgaatggaagaaattcattggctaatcctggcatcgctatggcaacacacaaagacgacgaggagcgtttttttcccagtaacgggatcctgatttttggcaaacaaaatgctgccagagacaatgcggattacagcgatgtcatgcccaccagcgaggaagaaatcaaaaccactaaccctgtggccacagaggaatacggtatcgtgacagataacttgcagcagcaaaacacggctcctcaaattggaactgtcaacagccagggggccttacccggtatggtctggcagaaccgggacgtgtacctgcagggtcccatctgggccaagattcctcacacggacggcaacttccacccgtctccgctgatgggcggctttggcctgaaacatcctccgcctcagatcctgatcaagaacacgcctgtacctgcggatcctccgaccaccttcaaccagtcaaagctgaactctttcatcacgcaatacagcaccggacaggtcagcgtggaaattgaatgggagctgcagaaggaaaacagcaagcgctggaaccccgagatccagtacacctccaactactacaaatctacaagtgtggactttgctgttaatacagaaggcgtgtactctgaaccccgccccattggcacccgttacctcacccgtaatctgtaa

SEQ ID NO: 12436 - DNA, 2217 bp, Artificial Sequence
  source: /note="Description of Artificial Sequence: Synthetic polynucleotide"
atggctgccgatggttatcttccagattggctcgaggacaacctctctgagggcattcgcgagtggtgggcgctgaaacctggagccccgaagcccaaagccaaccagcaaaagcaggacgacggccggggtctggtgcttcctggctacaagtacctcggacccttcaacggactcgacaagggggagcccgtcaacgcggcggacgcggcggccctcgagcacgacaaggcctacgaccagcagctgcaggcgggtgacaatccgtacctgcggtataaccacgccgacgccgagtttcaggagcgtctgcaagaagatacgtcttttgggggcaacctcgggcgagcagtcttccaggccaagaagcgggttctcgaacctctcggtctggttgaggaaggcgctaagacggctcctggaaagaagagaccggtagagccatcaccccagcgttctccagactcctctacgggcatcggcaagaagggccaacagcccgccagaaaaagactcaattttggtcagactggcgactcagagtcagttccagaccctcaacctctcggagaacctccagcagcgccctctggtgtgggacctaatacaatggctgcaggcggtggcgcaccaatggcagacaataacgaaggcgccgacggagtgggtagttcctcgggaaattggcattgcgattccacatggctgggcgacagagtcatcaccaccagcacccgaacctgggccctgcccacctacaacaaccacctctacaagcaaatctccaacgggacatcgggaggagccaccaacgacaacacctacttcggctacagcaccccctgggggtattttgactttaacagattccactgccacttttcaccacgtgactggcagcgactcatcaacaacaactggggattccggcccaagagactcagcttcaagctcttcaacatccaggtcaaggaggtcacgcagaatgaaggcaccaagaccatcgccaataacctcaccagcaccatccaggtgtttacggactcggagtaccagctgccgtacgttctcggctctgcccaccagggctgcctgcctccgttcccggcggacgtgttcacgattccccagtacggctacctaacactcaacaacggtagtcaggccgtgggacgctcctccttctactgcctggaatactttccttcgcagatgctgagaaccggcaacaacttccagtttacttacaccttcgaggacgtgcctttccacagcagctacgcccacagccagagcttggaccggctgatgaatcctctgattgaccagtacctgtactacttgtctcggattcaaacaacaggaggcacggcaaatacgcagactctgggcttcagccaaggtgggcctaatacaatggccaatcaggcaaagaactggctgccaggaccctgttaccgccaacaacgcgtctcaacgacaaccgggcaaaacaacaatagcaactttgcctggactgctgggaccaaataccatctgaatggaagaaattcattggctaatcctggcatcgctatggcaacacacaaagacgacgaggagcgtttttttcccagtaacgggatcctgatttttggcaaacaaaatgctgccagagacaatgcggattacagcgatgtcatgcccaccagcgaggaagaaatcaaaaccactaaccctgtggccacagaggaatacggtatcgtggcagataacttgcagcagcaaaacacggctcctcaaattggaactgtcaacagccagggggccttacccggtatggtctggcagaaccgggacgtgtacctgcagggtcccatctgggccaagattcctcacacggacggcaacttccacccgtctccgctgatgggcggctttggcctgaaacatcctccgcctcagatcctgatcaagaacacgcctgtacctgcggatcctccgaccaccttcaaccagtcaaagctgaactctttcatcacgcaatacagcaccggacaggtcagcgtggaaattgaatgggagctgcagaaggaaaacagcaagcgctggaaccccgagatccagtacacctccaactactacaaatctacaagtgtggactttgctattaatacagaaggcgtgtactctgaaccccgccccattggcacccgttacctcacccgtaatctgtaa

SEQ ID NO: 12437 - DNA, 2217 bp, Artificial Sequence
  source: /note="Description of Artificial Sequence: Synthetic polynucleotide"
atggctgccgatggttatcttccagattggctcgaggacaacctctctgagggcattcgcgagtggtgggcgctgaaacctggagccccgaagcccaaagccaaccagcaaaagcaggacgacggccggggtctggtgcttcctggctacaagtacctcggacccttcaacggactcgacaagggggagcccgtcaacgcggcggacgcggcggccctcgagcacgacaaggcctacgaccagcagctgcaggcgggtgacaatccgtacctgcggtataaccacgccgacgccgagtttcaggagcgtctgcaagaagatacgtcttttgggggcaacctcgggcgagcagtcttccaggccaagaagcgggttctcgaacctctcggtctggttgaggaaggcgctaagacggctcctggaaagaagagaccggtagagccatcaccccagcgttctccagactcctctacgggcatcggcaagaagggccaacagcccgccagaaaaagactcaattttggtcagactggcgactcagagtcagttccagaccctcaacctctcggagaacctccagcagcgccctctggtgtgggacctaatacaatggctgcaggcggtggcgcaccaatggcagacaataacgaaggcgccgacggagtgggtagttcctcgggaaattggcattgcgattccacatggctgggcgacagagtcatcaccaccagcacccgaacctgggccctgcccacctacaacaaccacctctacaagcaaatctccaacgggacatcgggaggagccaccaacgacaacacctacttcggctacagcaccccctgggggtattttgactttaacagattccactgccacttttcaccacgtgactggcagcgactcatcaacaacaactggggattccggcccaagagactcagcttcaagctcttcaacatccaggtcaaggaggtcacgcagaatgaaggcaccaagaccatcgccaataacctcaccagcaccatccaggtgtttacggactcggagtaccagctgccgtacgttctcggctctgcccaccagggctgcctgcctccgttcccggcggacgtgttcacgattccccagtacggctacctaacactcaacaacggtagtcaggccgtgggacgctcctccttctactgcctggaatactttccttcgcagatgctgagaaccggcaacaacttccagtttacttacaccttcgaggacgtgcctttccacagcagctacgcccacagccagagcttggaccggctgatgaatcctctgattgaccagtacctgtactacttgtctcggattcaaacaacaggaggcacggcaaatacgcagactctgggcttcagccaaggtgggcctaatacaatggccaatcaggcaaagaactggctgccaggaccctgttaccgccaacaacgcgtctcaacgacaaccgggcaaaacaacaatagcaactttgcctggactgctgggaccaaataccatctgaatggaagaaattcattggctaatcctggcatcgctatggcaacacacaaagacgacgaggagcgtttttttcccagtaacgggatcctgatttttggcaaacaaaatgctgccagagacaatgcggattacagcgatgtcatgcccaccagcgaggaagaaatcaaaaccactaaccctgtggccacagaggaatacggtatcgtggcagataacttgcagcagcaaaacacggctcctcaaattggaactgtcaacagccagggggccttacccggtatggtctggcagaaccgggacgtgtacctgcagggtcccatctgggccaagattcctcacgcggacggcaacttccacccgtctccgctgatgggcggctttggcctgaaacatcctccgcctcagatcctgatcaagaacacgcctgtacctgcggatcctccgaccaccttcaaccagtcaaagctgaactctttcatcacgcaatacagcaccggacaggtcagcgtggaaattgaatgggagctgcagaaggaaaacagcaagcgctggaaccccgagatccagtacacctccaactactacaaatctacaagtgtggactttgctgttaatacagaaggcgtgtactctgaaccccgccccattggcacccgttacctcacccgtaatctgtaa

SEQ ID NO: 12438 - DNA, 2217 bp, Artificial Sequence
  source: /note="Description of Artificial Sequence: Synthetic polynucleotide"
atggctgccgatggttatcttccagattggctcgaggacaacctctctgagggcattcgcgagtggtgggcgctgaaacctggagccccgaagcccaaagccaaccagcaaaagcaggacgacggccggggtctggtgcttcctggctacaagtacctcggacccttcaacggactcgacaagggggagcccgtcaacgcggcggacgcggcggccctcgagcacgacaaggcctacgaccagcagctgcaggcgggtgacaatccgtacctgcggtataaccacgccgacgccgagtttcaggagcgtctgcaagaagatacgtcttttgggggcaacctcgggcgagcagtcttccaggccaagaagcgggttctcgaacctctcggtctggttgaggaaggcgctaagacggctcctggaaagaagagaccggtagagccatcaccccagcgttctccagactcctctacgggcatcggcaagaagggccaacagcccgccagaaaaagactcaattttggtcagactggcgactcagagtcagttccagaccctcaacctctcggagaacctccagcagcgccctctggtgtgggacctaatacaatggctgcaggcggtggcgcaccaatggcagacaataacgaaggcgccgacggagtgggtagttcctcgggaaattggcattgcaattccacatggctgggcgacagagtcatcaccaccagcacccgaacctgggccctgcccacctacaacaaccacctctacaagcaaatctccaacgggacatcgggaggagccaccaacgacaacacctacttcggctacagcaccccctgggggtattttgactttaacagattccactgccacttttcaccacgtgactggcagcgactcatcaacaacaactggggattccggcccaagagactcagcttcaagctcttcaacatccaggtcaaggaggtcacgcagaatgaaggcaccaagaccatcgccaataacctcaccagcaccatccaggtgtttacggactcggagtaccagctgccgtacgttctcggctctgcccaccagggctgcctgcctccgttcccggcggacgtgttcacgattccccagtacggctacctaacactcaacaacggtagtcaggccgtgggacgctcctccttctactgcctggaatactttccttcgcagatgctgagaaccggcaacaacttccagtttacttacaccttcgaggacgtgcctttccacagcagctacgcccacagccagagcttggaccggctgatgaatcctctgattgaccagtacctgtactacttgtctcggattcaaacaacaggaggcacggcaaatacgcagactctgggcttcagccaaggtgggcctaatacaatggccaatcaggcaaagaactggctgccaggaccctgttaccgccaacaacgcgtctcaacgacaaccgggcaaaacaacaatagcaactttgcctggactgctgggaccaaataccatctgaatggaagaaattcattggctaatcctggcatcgctatggcaacacacaaagacgacgaggagcgtttttttcccagtaacgggatcctgatttttggcaaacaaaatgctgccagagacaatgcggattacagcgatgtcatgcccaccagcgaggaagaaatcaaaaccactaaccctgtggccacagaggaatacggtatcgtggcagataacttgcagcagcaaaacacggctcctcaaattggaactgtcaacagccagggggccttacccggtatggtctggcagaaccgggacgtgtacctgcagggtcccatctgggccaagattcctcacacggacggcaacttccacccgtctccgctgatgggcggctttggcctgaaacatcctccgcctcagatcctgatcaagaacacgcctgtacctgcggatcctccgaccaccttcaaccagtcaaagctgaactctttcatcacgcaatacagcaccggacaggtcagcgtggaaattgaatgggagctgcagaaggaaaacagcaagcgctggaaccccgagatccagtacacctccaactactacaaatctacaagtgtggactttgctgttaatacagaaggcgtgtactctgaaccccgccccattggcacccgttacctcacccgtaatctgtaa

SEQ ID NO: 12439 - DNA, 2217 bp, Artificial Sequence
  source: /note="Description of Artificial Sequence: Synthetic polynucleotide"
atggctgccgatggttatcttccagattggctcgaggacaacctctctgagggcattcgcgagtggtgggcgctgaaacctggagccccgaagcccaaagccaaccagcaaaagcaggacgacggccggggtctggtgcttcctggctacaagtacctcggacccttcaacggactcgacaagggggagcccgtcaacgcggcggacgcggcggccctcgagcacgacaaggcctacgaccagcagctgcaggcgggtgacaatccgtacctgcggtataaccacgccgacgccgagtttcaggagcgtctgcaagaagatacgtcttttgggggcaacctcgggcgagcagtcttccaggccaagaagcgggttctcgaacctctcggtctggttgaggaaggcgctaagacggctcctggaaagaagagaccggtagagccatcaccccagcgttctccagactcctctacgggcatcggcaagaagggccaacagcccgccagaaaaagactcaattttggtcagactggcgactcagagtcagttccagaccctcaacctctcggagaacctccagcagcgccctctggtgtgggacctaatacaatggctgcaggcggtggcgcaccaatggcagacaataacgaaggcgccgacggagtgggtagttcctcgggaaattggcattgcgattccacatggctgggcgacagagtcatcaccaccagcacccgaacctgggccctgcccacctacaacaaccacctctacaagcaaatctccaacgggacatcgggaggagccaccaacgacaacacctacttcggctacagcaccccctgggggtattttgactttaacagattccactgccacttttcaccacgtgactggcagcgactcatcaacaacaactggggattccggcccaagagactcagcttcaagctcttcaacatccaggtcaaggaggtcacgcagaatgaaggcaccaagaccatcgccaataacctcaccagcaccatccaggtgtttacggactcggagtaccagctgccgtacgttctcggctctgcccaccagggctgcctgcctccgttcccggcggacgtgttcacgattccccagtacggctacctaacactcaacaacggtagtcaggccgtgggacgctcctccttctactgcctggaatactttccttcgcagatgctgagaaccggcaacaacttccagtttacttacaccttcgaggacgtgcctttccacagcagctacgcccacagccagagcttggaccggctgatgaatcctctgattgaccagtacctgtactacttgtctcggattcaaacaacaggaggcacggcaaatacgcagactctgggcttcagccaaggtgggcctaatacaatggccaatcaggcaaagaactggctgccaggaccctgttaccgccaacaacgcgtctcaacgacaaccgggcaaaacaacaatagcaactttgcctggactgctgggaccaaataccatctgaatggaagaaattcattggctaatcctggcatcgctatggcaacacacaaagacgacgaggagcgtttttttcccagtaacgggatcctgatttttggcaaacaaaatgctgccagagacaatgcggattacagcgatgtcatgcccaccagcgaggaagaaatcaaaaccactaaccctgtggccacagaggaatacggtatcgtggcagataacttgcagcagcaaaacacggctcctcaaattggaactgtcaacagccagggggccttacccggtatggtctggcagaaccgggacgtgtacctgcagggtcccatctgggccaagattcctcacacggacggcaacttccacccgtctccgctgatgggcggctttggcctgaaacatcctccgcctcagatcctgatcaagaacacgcctgtacctgcggatcctccgaccaccttcaaccagtcaaagctgaactctttcatcacgcaatacagcaccggacaggtcagcgtggaaattgaatgggagctgcagaaggaaaacagcaagcgctggaaccccgagatccagtacacctccaactactacaaatctacaagtgtggactttgctgttaatacagaaggcgcgtactctgaaccccgccccattggcacccgttacctcacccgtaatctgtaa

SEQ ID NO: 12440 - DNA, 2217 bp, Artificial Sequence
  source: /note="Description of Artificial Sequence: Synthetic polynucleotide"
atggctgccgatggttatcttccagattggctcgaggacaacctctctgagggcattcgcgagtggtgggcgctgaaacctggagccccgaagcccaaagccaaccagcaaaagcaggacgacggccggggtctggtgcttcctggctacaagtacctcggacccttcaacggactcgacaagggggagcccgtcaacgcggcggacgcggcggccctcgagcacgacaaggcctacgaccagcagctgcaggcgggtgacaatccgtacctgcggtataaccacgccgacgccgagtttcaggagcgtctgcaagaagatacgtcttttgggggcaacctcgggcgagcagtcttccaggccaagaagcgggttctcgaacctctcggtctggttgaggaaggcgctaagacggctcctggaaagaagagaccggtagagccatcaccccagcgttctccagactcctctacgggcatcggcaagaagggccaacagcccgccagaaaaagactcaattttggtcagactggcgactcagagtcagttccagaccctcaacctctcggagaacctccagcagcgccctctggtgtgggacctaatacaatggctgcaggcggtggcgcaccaatggcagacaataacgaaggcgccgacggagtgggtagttcctcgggaaattggcattgcgattccacatggctgggcgacagagtcatcaccaccagcacccgaacctgggccctgcccacctacaacaaccacctctacaagcaaatctccaacgggacatcgggaggagccaccaacgacaacacctacttcggctacagcaccccctgggggtattttgactttaacagattccactgccacttttcaccacgtgactggcagcgactcatcaacaacaactggggattccggcccaagagactcagcttcaagctcttcaacatccaggtcaaggaggtcacgcagaatgaaggcaccaagaccatcgccaataacctcaccagcaccatccaggtgtttacggactcggagtaccagctgccgtacgttctcggctctgcccaccagggctgcctgcctccgttcccggcggacgtgttcacgattccccagtacggctacctaacactcaacaacggtagtcaggccgtgggacgctcctccttctactgcctggaatactttccttcgcagatgctgagaaccggcaacaacttccagtttacttacaccttcgaggacgtgcctttccacagcagctacgcccacagccagagcttggaccggctgatgaatcctctgattgaccagtacctgtactacttgtctcggattcaaacaacaggaggcacggcaaatacgcagactctgggcttcagccaaggtgggcctaatacaatggccaatcaggcaaagaactggctgccaggaccctgttaccgccaacaacgcgtctcaacgacaaccgggcaaaacaacaatagcaactttgcctggactgctgggaccaaataccatctgaatggaagaaattcattggctaatcctggcatcgctatggcaacacacaaagacgacgaggagcgtttttttcccagtaacgggatcctgatttttggcaaacaaaatgctgccagagacaatgcggattacagcgatgtcatgcccaccagcgaggaagaaatcaaaaccactaaccctgtggccacagaggaatgcggtatcgtggcagataacttgcagcagcaaaacacggctcctcaaattggaactgtcaacagccagggggccttacccggtatggtctggcagaaccgggacgtgtacctgcagggtcccatctgggccaagattcctcacacggacggcaacttccacccgtctccgctgatgggcggctttggcctgaaacatcctccgcctcagatcctgatcaagaacacgcctgtacctgcggatcctccgaccaccttcaaccagtcaaagctgaactctttcatcacgcaatacagcaccggacaggtcagcgtggaaattgaatgggagctgcagaaggaaaacagcaagcgctggaaccccgagatccagtacacctccaactactacaaatctacaagtgtggactttgctgttaatacagaaggcgtgtactctgaaccccgccccattggcacccgttacctcacccgtaatctgtaa

SEQ ID NO: 12441 - DNA, 2217 bp, Artificial Sequence
  source: /note="Description of Artificial Sequence: Synthetic polynucleotide"
atggctgccgatggttatcttccagattggctcgaggacaacctctctgagggcattcgcgagtggtgggcgctgaaacctggagccccgaagcccaaagccaaccagcaaaagcaggacgacggccggggtctggtgcttcctggctacaagtacctcggacccttcaacggactcgacaagggggagcccgtcaacgcggcggacgcggcggccctcgagcacgacaaggcctacgaccagcagctgcaggcgggtgacaatccgtacctgcggtataaccacgccgacgccgagtttcaggagcgtctgcaagaagatacgtcttttgggggcaacctcgggcgagcagtcttccaggccaagaagcgggttctcgaacctctcggtctggttgaggaaggcgctaagacggctcctggaaagaagagaccggtagagccatcaccccagcgttctccagactcctctacgggcatcggcaagaagggccaacagcccgccagaaaaagactcaattttggtcagactggcgactcagagtcagttccagaccctcaacctctcggagaacctccagcagcgccctctggtgtgggacctaatacaatggctgcaggcggtggcgcaccaatggcagacaataacgaaggcgccgacggagtgggtagttcctcgggaaattggcattgcgattccacatggctgggcgacagagtcatcaccaccagcacccgaacctgggccctgcccacctacaacaaccacctctacaagcaaatctccaacgggacatcgggaggagccaccaacgacaacacctacttcggctacagcaccccctgggggtattttgactttaacagattccactgccacttttcaccacgtgactggcagcgactcatcaacaacaactggggattccggcccaagagactcagcttcaagctcttcaacatccaggtcaaggaggtcacgcagaatgaaggcaccaagaccatcgccaataacctcaccagcaccatccaggtgtttacggactcggagtaccagctgccgtacgttctcggctctgcccaccagggctgcctgcctccgttcccggcggacgtgttcacgattccccagtacggctacctaacactcaacaacggtagtcaggccgtgggacgctcctccttctactgcctggaatactttccttcgcagatgctgagaaccggcaacaacttccagtttacttacaccttcgaggacgtgcctttccacagcagctacgcccacagccagagcttggaccggctgatgaatcctctgattgaccagtacctgtactacttgtctcggattcaaacaacaggaggcacggcaaatacgcagactctgggcttcagccaaggtgggcctaatacaatggccaatcaggcaaagaactggctgccaggaccctgttaccgccaacaacgcgtctcaacgacaaccgggcaaaacaacaatagcaactttgcctggactgctgggaccaaataccatctgaatggaagaaattcattggctaatcctggcatcgctatggcaacacacaaagacgacgaggagcgtttttttcccagtaacgggatcctgatttttggcaaacaaaatgctgccagagacaatgcggattacagcgatgtcatgcccaccagcgaggaagaaatcaaaaccactaaccctgtggccacagaggaatacggtatcgtggcagataacttgcagcagcaaaacacggctcctcaaattggaactgtcaacagccagggggccttacccggtatggtctggcagaaccgggacgtgtacctgcagggtcccatctgggccaagattcctcacacggacggcaacttccacccgtctccgctgatgggcggctttggcctgaaacatcctccgcctcagatcctgatcaagaacacgcctgtacctgcggatcctccgaccaccttcaaccagtcaaagctgaactctttcatcacgcaatacagcaccggacaggtcagcgtggaaattgaatgggagctgcagaaggaaaacagcaagcgctggaaccccgagatccggtacacctccaactactacaaatctacaagtgtggactttgctgttaatacagaaggcgtgtactctgaaccccgccccattggcacccgttacctcacccgtaatctgtaa

SEQ ID NO: 12442 - DNA, 2217 bp, Artificial Sequence
  source: /note="Description of Artificial Sequence: Synthetic polynucleotide"
atggctgccgatggttatcttccagattggctcgaggacaacctctctgagggcattcgcgagtggtgggcgctgaaacctggagccccgaagcccaaagccaaccagcaaaagcaggacgacggccggggtctggtgcttcctggctacaagtacctcggacccttcaacggactcgacaagggggagcccgtcaacgcggcggacgcggcggccctcgagcacgacaaggcctacgaccagcagctgcaggcgggtgacaatccgtacctgcggtataaccacgccgacgccgagtttcaggagcgtctgcaagaagatacgtcttttgggggcaacctcgggcgagcagtcttccaggccaagaagcgggttctcgaacctctcggtctggttgaggaaggcgctaagacggctcctggaaagaagagaccggtagagccatcaccccagcgttctccagactcctctacgggcatcggcaagaagggccaacagcccgccagaaaaagactcaattttggtcagactggcgactcagagtcagttccagaccctcaacctctcggagaacctccagcagcgccctctggtgtgggacctaatacaatggctgcaggcggtggcgcaccaatggcagacaataacgaaggcgccgacggagtgggtagttcctcgggaaattggcattgcgattccacatggctgggcgacagagtcatcaccaccagcacccgaacctgggccctgcccacctacaacaaccacctctacaagcaaatctccaacgggacatcgggaggagccaccaacgacaacacctacttcggctacagcaccccctgggggtattttgactttaacagattccactgccacttttcaccacgtgactggcagcgactcatcaacaacaactggggattccggcccaagagactcagcttcaagctcttcaacatccaggtcaaggaggtcacgcagaatgaaggcaccaagaccatcgccaataacctcaccagcaccatccaggtgtttacggactcggagtaccagctgccgtacgttctcggctctgcccaccagggctgcctgcctccgttcccggcggacgtgttcacgattccccagtacggctacctaacactcaacaacggtagtcaggccgtgggacgctcctccttctactgcctggaatactttccttcgcagatgctgagaaccggcaacaacttccagtttacttacaccttcgaggacgtgcctttccacagcagctacgcccacagccagagcttggaccggctgatgaatcctctgattgaccagtacctgtactacttgtctcggattcaaacaacaggaggcacggcaaatacgcagactctgggcttcagccaaggtgggcctaatacaatggccaatcaggcaaagaactggctgccaggaccctgttaccgccaacaacgcgtctcaacgacaaccgggcaaaacaacaatagcaactttgcctggactgctgggaccaaataccatctgaatggaagaaattcattggctaatcctggcatcgctatggcaacacacaaagacgacgaggagcgtttttttcccagtaacgggatcctgatttttggcaaacaaaatgctgccagagacaatgcggattgcagcgatgtcatgcccaccagcgaggaagaaatcaaaaccactaaccctgtggccacagaggaatacggtatcgtggcagataacttgcagcagcaaaacacggctcctcaaattggaactgtcaacagccagggggccttacccggtatggtctggcagaaccgggacgtgtacctgcagggtcccatctgggccaagattcctcacacggacggcaacttccacccgtctccgctgatgggcggctttggcctgaaacatcctccgcctcagatcctgatcaagaacacgcctgtacctgcggatcctccgaccaccttcaaccagtcaaagctgaactctttcatcacgcaatacagcaccggacaggtcagcgtggaaattgaatgggagctgcagaaggaaaacagcaagcgctggaaccccgagatccagtacacctccaactactacaaatctacaagtgtggactttgctgttaatacagaaggcgtgtactctgaaccccgccccattggcacccgttacctcacccgtaatctgtaa

SEQ ID NO: 12443 - DNA, 2217 bp, Artificial Sequence
  source: /note="Description of Artificial Sequence: Synthetic polynucleotide"
atggctgccgatggttatcttccagattggctcgaggacaacctctctgagggcattcgcgagtggtgggcgctgaaacctggagccccgaagcccaaagccaaccagcaaaagcaggacgacggccggggtctggtgcttcctggctacaagtacctcggacccttcaacggactcgacaagggggagcccgtcaacgcggcggacgcggcggccctcgagcacgacaaggcctacgaccagcagctgcaggcgggtgacaatccgtacctgcggtataaccacgccgacgccgagtttcaggagcgtctgcaagaagatacgtcttttgggggcaacctcgggcgagcagtcttccaggccaagaagcgggttctcgaacctctcggtctggttgaggaaggcgctaagacggctcctggaaagaagagaccggtagagccatcaccccagcgttctccagactcctctacgggcatcggcaagaagggccaacagcccgccagaaaaagactcaattttggtcagactggcgactcagagtcagttccagaccctcaacctctcggagaacctccagcagcgccctctggtgtgggacctaatacaatggctgcaggcggtggcgcaccaatggcagacaataacgaaggcgccgacggagtgggtagttcctcgggaaattggcattgcgattccacatggctgggcgacagagtcatcaccaccagcacccgaacctgggccctgcccacctacaacaaccacctctacaagcaaatctccaacgggacatcgggaggagccaccaacgacaacacctacttcggctacagcaccccctgggggtattttgactttaacagattccactgccacttttcaccacgtgactggcagcgactcatcaacaacaactggggattccggcccaagagactcagcttcaagctcttcaacatccaggtcaaggaggtcacgcagaatgaaggcaccaagaccatcgccaataacctcaccagcaccatccaggtgtttacggactcggagtaccagctgccgtacgttctcggctctgcccaccagggctgcctgcctccgttcccggcggacgtgttcacgattccccagtacggctacctaacactcaacaacggtagtcaggccgtgggacgctcctccttctactgcctggaatactttccttcgcagatgctgagaaccggcaacaacttccagtttacttacaccttcgaggacgtgcctttccacagcagctacgcccacagccagagcttggaccggctgatgaatcctctgattgaccagtacctgtactacttgtctcggattcaaacaacaggaggcacggcaaatacgcagactctgggcttcagccaaggtgggcctaatacaatggccaatcaggcaaagaactggctgccaggaccctgttaccgccaacaacgcgtctcaacgacaaccgggcaaaacaacaatagcaactttgcctggactgctgggaccaaataccatctgaatggaagaaattcattggctaatcctggcatcgctatggcaacacacaaagacgacgaggagcgtttttttcccagtaacgggatcctgatttttggcaaacaaaatgctgccagagacaatgcggattacagcgatgtcatgcccaccagcgaggaagaaatcaaaaccactaaccctgtggccacagaggaatacggtatcgcggcagataacttgcagcagcaaaacacggctcctcaaattggaactgtcaacagccagggggccttacccggtatggtctggcagaaccgggacgtgtacctgcagggtcccatctgggccaagattcctcacacggacggcaacttccacccgtctccgctgatgggcggctttggcctgaaacatcctccgcctcagatcctgatcaagaacacgcctgtacctgcggatcctccgaccaccttcaaccagtcaaagctgaactctttcatcacgcaatacagcaccggacaggtcagcgtggaaattgaatgggagctgcagaaggaaaacagcaagcgctggaaccccgagatccagtacacctccaactactacaaatctacaagtgtggactttgctgttaatacagaaggcgtgtactctgaaccccgccccattggcacccgttacctcacccgtaatctgtaa

SEQ ID NO: 12444 - DNA, 2217 bp, Artificial Sequence
  source: /note="Description of Artificial Sequence: Synthetic polynucleotide"
atggctgccgatggttatcttccagattggctcgaggacaacctctctgagggcattcgcgagtggtgggcgctgaaacctggagccccgaagcccaaagccaaccagcaaaagcaggacgacggccggggtctggtgcttcctggctacaagtacctcggacccttcaacggactcgacaagggggagcccgtcaacgcggcggacgcggcggccctcgagcacgacaaggcctacgaccagcagctgcaggcgggtgacaatccgtacctgcggtataaccacgccgacgccgagtttcaggagcgtctgcaagaagatacgtcttttgggggcaacctcgggcgagcagtcttccaggccaagaagcgggttctcgaacctctcggtctggttgaggaaggcgctaagacggctcctggaaagaagagaccggtagagccatcaccccagcgttctccagactcctctacgggcatcggcaagaagggccaacagcccgccagaaaaagactcaattttggtcagactggcgactcagagtcagttccagaccctcaacctctcggagaacctccagcagcgccctctggtgtgggacctaatacaatggctgcaggcggtggcgcaccaatggcagacaataacgaaggcgccgacggagtgggtagttcctcgggaaattggcattgcgattccacatggctgggcgacagagtcatcaccaccagcacccgaacctgggccctgcccacctacaacaaccacctctacaagcaaatctccaacgggacatcgggaggagccaccaacgacaacacctacttcggctacagcaccccctgggggtattttgactttaacagattccactgccacttttcaccacgtgactggcagcgactcatcaacaacaactggggattccggcccaagagactcagcttcaagctcttcaacatccaggtcaaggaggtcacgcagaatgaaggcaccaagaccatcgccaataacctcaccagcaccatccaggtgtttacggactcggagtaccagctgccgtacgttctcggctctgcccaccagggctgcctgcctccgttcccggcggacgtgttcacgattccccagtacggctacctaacactcaacaacggtagtcaggccgtgggacgctcctccttctactgcctggaatactttccttcgcagatgctgagaaccggcaacaacttccagtttacttacaccttcgaggacgtgcctttccacagcagctacgcccacagccagagcttggaccggctgatgaatcctctgattgaccagtacctgtactacttgtctcggattcaaacaacaggaggcacggcaaatacgcagactctgggcttcagccaaggtgggcctaatacaatggccaatcaggcaaagaactggctgccaggaccctgttaccgccaacaacgcgtctcaacgacaaccgggcaaaacaacaatagcaactttgcctggactgctgggaccaaataccatctgaatggaagaaattcattggctaatcctggcatcgctatggcaacacacaaagacgacgaggagcgtttttttcccagtaacgggatcctgatttttggcaaacaaaatgctgccagagacaatgcggattacagcgatgtcatgcccaccagcgaggaagaaatcaaaaccactaaccctgtggccacagaggaatacggtatcgtggcagataacttgcagcagcaaaacacggctcctcaaattggaactgtcaacagccagggggccttacccggtatgatctggcagaaccgggacgtgtacctgcagggtcccatctgggccaagattcctcacacggacggcaacttccacccgtctccgctgatgggcggctttggcctgaaacatcctccgcctcagatcctgatcaagaacacgcctgtacctgcggatcctccgaccaccttcaaccagtcaaagctgaactctttcatcacgcaatacagcaccggacaggtcagcgtggaaattgaatgggagctgcagaaggaaaacagcaagcgctggaaccccgagatccagtacacctccaactactacaaatctacaagtgtggactttgctgttaatacagaaggcgtgtactctgaaccccgccccattggcacccgttacctcacccgtaatctgtaa

SEQ ID NO: 12445 - DNA, 2217 bp, Artificial Sequence
  source: /note="Description of Artificial Sequence: Synthetic polynucleotide"
atggctgccgatggttatcttccagattggctcgaggacaacctctctgagggcattcgcgagtggtgggcgctgaaacctggagccccgaagcccaaagccaaccagcaaaagcaggacgacggccggggtctggtgcttcctggctacaagtacctcggacccttcaacggactcgacaagggggagcccgtcaacgcggcggacgcggcggccctcgagcacgacaaggcctacgaccagcggctgcaggcgggtgacaatccgtacctgcggtataaccacgccgacgccgagtttcaggagcgtctgcaagaagatacgtcttttgggggcaacctcgggcgagcagtcttccaggccaagaagcgggttctcgaacctctcggtctggttgaggaaggcgctaagacggctcctggaaagaagagaccggtagagccatcaccccagcgttctccagactcctctacgggcatcggcaagaagggccaacagcccgccagaaaaagactcaattttggtcagactggcgactcagagtcagttccagaccctcaacctctcggagaacctccagcagcgccctctggtgtgggacctaatacaatggctgcaggcggtggcgcaccaatggcagacaataacgaaggcgccgacggagtgggtagttcctcgggaaattggcattgcgattccacatggctgggcgacagagtcatcaccaccagcacccgaacctgggccctgcccacctacaacaaccacctctacaagcaaatctccaacgggacatcgggaggagccaccaacgacaacacctacttcggctacagcaccccctgggggtattttgactttaacagattccactgccacttttcaccacgtgactggcagcgactcatcaacaacaactggggattccggcccaagagactcagcttcaagctcttcaacatccaggtcaaggaggtcacgcagaatgaaggcaccaagaccatcgccaataacctcaccagcaccatccaggtgtttacggactcggagtaccagctgccgtacgttctcggctctgcccaccagggctgcctgcctccgttcccggcggacgtgttcacgattccccagtacggctacctaacactcaacaacggtagtcaggccgtgggacgctcctccttctactgcctggaatactttccttcgcagatgctgagaaccggcaacaacttccagtttacttacaccttcgaggacgtgcctttccacagcagctacgcccacagccagagcttggaccggctgatgaatcctctgattgaccagtacctgtactacttgtctcggattcaaacaacaggaggcacggcaaatacgcagactctgggcttcagccaaggtgggcctaatacaatggccaatcaggcaaagaactggctgccaggaccctgttaccgccaacaacgcgtctcaacgacaaccgggcaaaacaacaatagcaactttgcctggactgctgggaccaaataccatctgaatggaagaaattcattggctaatcctggcatcgctatggcaacacacaaagacgacgaggagcgtttttttcccagtaacgggatcctgatttttggcaaacaaaatgctgccagagacaatgcggattacagcgatgtcatgcccaccagcgaggaagaaatcaaaaccactaaccctgtggccacagaggaatacggtatcgtggcagataacttgcagcagcaaaacacggctcctcaaattggaactgtcaacagccagggggccttacccggtatggtctggcagaaccgggacgtgtacctgcagggtcccatctgggccaagattcctcacacggacggcaacttccacccgtctccgctgatgggcggctttggcctgaaacatcctccgcctcagatcctgatcaagaacacgcctgtacctgcggatcctccgaccaccttcaaccagtcaaagctgaactctttcatcacgcaatacagcaccggacaggtcagcgtggaaattgaatgggagctgcagaaggaaaacagcaagcgctggaaccccgagatccagtacacctccaactactacaaatctacaagtgtggactttgctgttaatacagaaggcgtgtactctgaaccccgccccattggcacccgttacctcacccgtaatctgtaa

SEQ ID NO: 12446 - DNA, 2217 bp, Artificial Sequence
  source: /note="Description of Artificial Sequence: Synthetic polynucleotide"
atggctgccgatggttatcttccagattggctcgaggacaacctctctgagggcattcgcgagtggtgggcgctgaaacctggagccccgaagcccaaagccaaccagcaaaagcaggacgacggccggggtctggtgcttcctggctacaagtacctcggacccttcaacggactcgacaagggggagcccgtcaacgcggcggacgcggcggccctcgagcacgacaaggcctacgaccagcagctgcaggcgggtgacaatccgtacctgcggtataaccacgccgacgccgagtttcaggagcgtctgcaagaagatacgtcttttgggggcaacctcgggcgagcagtcttccaggccaagaagcgggttctcgaacctctcggtctggttgaggaaggcgctaagacggctcctggaaagaagagaccggtagagccatcaccccagcgttctccagactcctctacgggcatcggcaagaagggccaacagcccgccagaaaaagactcaattttggtcagactggcgactcagagtcagttccagaccctcaacctctcggagaacctccagcagcgccctctggtgtgggacctaatacaatggctgcaggcggtggcgcaccaatggcagacaataacgaaggcgccgacggagtgggtagttcctcgggaaattggcattgcgattccacatggctgggcgacagagtcatcaccaccagcacccgaacctgggccctgcccacctacaacaaccacctctacaagcaaatctccaacgggacatcgggaggagccaccaacgacaacacctacttcggctacagcaccccctgggggtattttgactttaacagattccactgccacttttcaccacgtgactggcagcgactcatcaacaacaactggggattccggcccaagagactcagcttcaagctcttcaacatccaggtcaaggaggtcacgcagaatgaaggcaccaagaccatcgccaataacctcaccagcaccatccaggtgtttacggactcggagtaccagctgccgtacgttctcggctctgcccaccagggctgcctgcctccgttcccggcggacgtgttcacgattccccagtacggctacctaacactcaacaacggtagtcaggccgtgggacgctcctccttctactgcctggaatactttccttcgcagatgctgagaaccggcaacaacttccagtttacttacaccttcgaggacgtgcctttccacagcagctacgcccacagccagagcttggaccggctgatgaatcctctgattgaccagtacctgtactacttgtctcggattcaaacaacaggaggcacggcaaatacgcagactctgggcttcagccaaggtgggcctaatacaatggccaatcaggcaaagaactggctgccaggaccctgttaccgccaacaacgcgtctcaacgacaaccgggcaaaacaacaatagcaactttgcctggactgctgggaccaaataccatctgaatggaagaaattcattggctaatcctggcatcgctatggcaacacacaaagacgacgaggagcgtttttttcccagtaacgggatcctgatttttggcaaacaaaatgctgccagagacaatgcggattacagcgatgtcatgcccaccagcgaggaagaaatcaaaaccactaaccctgtggccacagaggaatacggtatcgtggcagataacttgcagcagcaaaacacggctcctcaaattggaactgtcaacggccagggggccttacccggtatggtctggcagaaccgggacgtgtacctgcagggtcccatctgggccaagattcctcacacggacggcaacttccacccgtctccgctgatgggcggctttggcctgaaacatcctccgcctcagatcctgatcaagaacacgcctgtacctgcggatcctccgaccaccttcaaccagtcaaagctgaactctttcatcacgcaatacagcaccggacaggtcagcgtggaaattgaatgggagctgcagaaggaaaacagcaagcgctggaaccccgagatccagtacacctccaactactacaaatctacaagtgtggactttgctgttaatacagaaggcgtgtactctgaaccccgccccattggcacccgttacctcacccgtaatctgtaa

SEQ ID NO: 12447 - DNA, 2217 bp, Artificial Sequence
  source: /note="Description of Artificial Sequence: Synthetic polynucleotide"
atggctgccgatggttatcttccagattggctcgaggacaacctctctgagggcattcgcgagtggtgggcgctgaaacctggagccccgaagcccaaagccaaccagcaaaagcaggacgacggccggggtctggtgcttcctggctacaagtacctcggacccttcaacggactcgacaagggggagcccgtcaacgcggcggacgcggcggccctcgagcacgacaaggcctacgaccagcagctgcaggcgggtgacaatccgtacctgcggtataaccacgccgacgccgagtttcaggagcgtctgcaagaagatacgtcttttgggggcaacctcgggcgagcagtcttccaggccaagaagcgggttctcgaacctctcggtctggttgaggaaggcgctaagacggctcctggaaagaagagaccggtagagccatcaccccagcgttctccagactcctctacgggcatcggcaagaagggccaacagcccgccagaaaaagactcaattttggtcagactggcgactcagagtcagttccagaccctcaacctctcggagaacctccagcagcgccctctggtgtgggacctaatacaatggctgcaggcggtggcgcaccaatggcagacaataacgaaggcgccgacggagtgggtagttcctcgggaaattggcattgcgattccacatggctgggcgacagagtcatcaccaccagcacccgaacctgggccctgcccacctacaacaaccacctctacaagcaaatctccaacgggacatcgggaggagccaccaacgacaacacctacttcggctacagcaccccctgggggtattttgactttaacagattccactgccacttttcaccacgtgactggcagcgactcatcaacaacaactggggattccggcccaagagactcagcttcaagctcttcaacatccaggtcaaggaggtcacgcagaatgaaggcaccaagaccatcgccaataacctcaccagcaccatccaggtgtttacggactcggagtaccagctgccgtacgttctcggctctgcccaccagggctgcctgcctccgttcccggcggacgtgttcacgattccccagtacggctacctaacactcaacaacggtagtcaggccgtgggacgctcctccttctactgcctggaatactttccttcgcagatgctgagaaccggcaacaacttccagtttacttacaccttcgaggacgtgcctttccacagcagctacgcccacagccagagcttggaccggctgatgaatcctctgattgaccagtacctgtactacttgtctcggattcaaacaacaggaggcacggcaaatacgcagactctgggcttcagccaaggtgggcctaatacaatggccaatcaggcaaagaactggctgccaggaccctgttaccgccaacaacgcgtctcaacgacaaccgggcaaaacaacaatagcaactttgcctggactgctgggaccaaataccatctgaatggaagaaattcattggctaatcctggcatcgctatggcaacacacaaagacgacgaggagtgtttttttcccagtaacgggatcctgatttttggcaaacaaaatgctgccagagacaatgcggattacagcgatgtcatgcccaccagcgaggaagaaatcaaaaccactaaccctgtggccacagaggaatacggtatcgtggcagataacttgcagcagcaaaacacggctcctcaaattggaactgtcaacagccagggggccttacccggtatggtctggcagaaccgggacgtgtacctgcagggtcccatctgggccaagattcctcacacggacggcaacttccacccgtctccgctgatgggcggctttggcctgaaacatcctccgcctcagatcctgatcaagaacacgcctgtacctgcggatcctccgaccaccttcaaccagtcaaagctgaactctttcatcacgcaatacagcaccggacaggtcagcgtggaaattgaatgggagctgcagaaggaaaacagcaagcgctggaaccccgagatccagtacacctccaactactacaaatctacaagtgtggactttgctgttaatacagaaggcgtgtactctgaaccccgccccattggcacccgttacctcacccgtaatctgtaa

SEQ ID NO: 12448 - DNA, 2217 bp, Artificial Sequence
  source: /note="Description of Artificial Sequence: Synthetic polynucleotide"
atggctgccgatggttatcttccagattggctcgaggacaacctctctgagggcattcgcgagtggtgggcgctgaaacctggagccccgaagcccaaagccaaccagcaaaagcaggacgacggccggggtctggtgcttcctggctacaagtacctcggacccttcaacggactcgacaagggggagcccgtcaacgcggcggacgcggcggccctcgagcacgacaaggcctacgaccagcagctgcaggcgggtgacaatccgtacctgcggtataaccacgccgacgccgagtttcaggagcgtctgcaagaagatacgtcttttgggggcaacctcgggcgagcagtcttccaggccaagaagcgggttctcgaacctctcggtctggttgaggaaggcgctaagacggctcctggaaagaagagaccggtagagccatcaccccagcgttctccagactcctctacgggcatcggcaagaagggccaacagcccgccagaaaaagactcaattttggtcagactggcgactcagagtcagttccagaccctcaacctctcggagaacctccagcagcgccctctggtgtgggacctaatacaatggctgcaggcggtggcgcaccaatggcagacaataacgaaggcgccgacggagtgggtagttcctcgggaaattggcattgcgattccacatggctgggcgacagagtcatcaccaccagcacccgaacctgggccctgcccacctacaacaaccacctctacaagcaaatctccaacgggacatcgggaggagccaccaacgacaacacctacttcggctacagcaccccctgggggtattttgactttaacagattccactgccacttttcaccacgtgactggcagcgactcatcaacaacaactggggattccggcccaagagactcagcttcaagctcttcaacatccaggtcaaggaggtcacgcagaatgaaggcaccaagaccatcgccaataacctcaccagcaccatccaggtgtttacggactcggagtaccagctgccgtacgttctcggctctgcccaccagggctgcctgcctccgttcccggcggacgtgttcacgattccccagtacggctacctaacactcaacaacggtagtcaggccgtgggacgctcctccttctactgcctggaatactttccttcgcagatgctgagaaccggcaacaacttccagtttacttacaccttcgaggacgtgcctttccacagcagctacgcccacagccagagcttggaccggctgatgaatcctctgattgaccagtacctgtactacttgtctcggattcaaacaacaggaggcacggcaaatacgcagactctgggcttcagccaaggtgggcctaatacaatggccaatcaggcaaagaactggctgccaggaccctgttaccgccaacaacgcgtctcaacgacaaccgggcaaaacaacaatagcaactttgcctggactgctgggaccaaataccatctgaatggaagaaattcattggctaatcctggcatcgctatggcaacacacaaagacgacgaggagcgtttttttcccagtaacgggatcctgatttttggcaaacaaaatgctgccagagacaatgcggattacagcgatgtcatgcccaccagcgaggaagaaatcaaaaccactaaccctgtggccacagaggaatacggtatcgtggcagataacttgcagcagcaaaacacggctcctcaaattggaactgtcaacagccagggggccttacccggtatggtctggcagaaccgggacgcgtacctgcagggtcccatctgggccaagattcctcacacggacggcaacttccacccgtctccgctgatgggcggctttggcctgaaacatcctccgcctcagatcctgatcaagaacacgcctgtacctgcggatcctccgaccaccttcaaccagtcaaagctgaactctttcatcacgcaatacagcaccggacaggtcagcgtggaaattgaatgggagctgcagaaggaaaacagcaagcgctggaaccccgagatccagtacacctccaactactacaaatctacaagtgtggactttgctgttaatacagaaggcgtgtactctgaaccccgccccattggcacccgttacctcacccgtaatctgtaa

SEQ ID NO: 12449 - DNA, 2217 bp, Artificial Sequence
  source: /note="Description of Artificial Sequence: Synthetic polynucleotide"
atggctgccgatggttatcttccagattggctcgaggacaacctctctgagggcattcgcgagtggtgggcgctgaaacctggagccccgaagcccaaagccaaccagcaaaagcaggacgacggccggggtctggtgcttcctggctacaagtacctcggacccttcaacggactcgacaagggggagcccgtcaacgcggcggacgcggcggccctcgagcacgacaaggcctacgaccagcagctgcaggcgggtgacaatccgtacctgcggtataaccacgccgacgccgagtttcaggagcgtctgcaagaagatacgtcttttgggggcaacctcgggcgagcagtcttccaggccaagaagcgggttctcgaacctctcggtctggttgaggaaggcgctaagacggctcctggaaagaagagaccggtagagccatcaccccagcgttctccagactcctctacgggcatcggcaagaagggccaacagcccgccagaaaaagactcaattttggtcagactggcgactcagagtcagttccagaccctcaacctctcggagaacctccagcagcgccctctggtgtgggacctaatacaatggctgcaggcggtggcgcaccaatggcagacaataacgaaggcgccgacggagtgggtagttcctcgggaaattggcattgcgattccacatggctgggcgacagagtcatcaccaccagcacccgaacctgggccctgcccacctacaacaaccacctctacaagcaaatctccaacgggacatcgggaggagccaccaacgacaacacctacttcggctacagcaccccctgggggtattttgactttaacagattccactgccacttttcaccacgtgactggcagcgactcatcaacaacaactggggattccggcccaagagactcagcttcaagctcttcaacatccaggtcaaggaggtcacgcagaatgaaggcaccaagaccatcgccaataacctcaccagcaccatccaggtgtttacggactcggagtaccagctgccgtacgttctcggctctgcccaccagggctgcctgcctccgttcccggcggacgtgttcacgattccccagtacggctacctaacactcaacaacggtagtcaggccgcgggacgctcctccttctactgcctggaatactttccttcgcagatgctgagaaccggcaacaacttccagtttacttacaccttcgaggacgtgcctttccacagcagctacgcccacagccagagcttggaccggctgatgaatcctctgattgaccagtacctgtactacttgtctcggattcaaacaacaggaggcacggcaaatacgcagactctgggcttcagccaaggtgggcctaatacaatggccaatcaggcaaagaactggctgccaggaccctgttaccgccaacaacgcgtctcaacgacaaccgggcaaaacaacaatagcaactttgcctggactgctgggaccaaataccatctgaatggaagaaattcattggctaatcctggcatcgctatggcaacacacaaagacgacgaggagcgtttttttcccagtaacgggatcctgatttttggcaaacaaaatgctgccagagacaatgcggattacagcgatgtcatgcccaccagcgaggaagaaatcaaaaccactaaccctgtggccacagaggaatacggtatcgtggcagataacttgcagcagcaaaacacggctcctcaaattggaactgtcaacagccagggggccttacccggtatggtctggcagaaccgggacgtgtacctgcagggtcccatctgggccaagattcctcacacggacggcaacttccacccgtctccgctgatgggcggctttggcctgaaacatcctccgcctcagatcctgatcaagaacacgcctgtacctgcggatcctccgaccaccttcaaccagtcaaagctgaactctttcatcacgcaatacagcaccggacaggtcagcgtggaaattgaatgggagctgcagaaggaaaacagcaagcgctggaaccccgagatccagtacacctccaactactacaaatctacaagtgtggactttgctgttaatacagaaggcgtgtactctgaaccccgccccattggcacccgttacctcacccgtaatctgtaa

SEQ ID NO: 12450 - DNA, 2217 bp, Artificial Sequence
  source: /note="Description of Artificial Sequence: Synthetic polynucleotide"
atggctgccgatggttatcttccagattggctcgaggacaacctctctgagggcattcgcgagtggtgggcgctgaaacctggagccccgaagcccaaagccaaccagcaaaagcaggacgacggccggggtctggtgcttcctggctacaagtacctcggacccttcaacggactcgacaagggggagcccgtcaacgcggcggacgcggcggccctcgagcacgacaaggcctacgaccagcagctgcaggcgggtgacaatccgtacctgcggtataaccacgccgacgccgagtttcaggagcgtctgcaagaagatacgtcttttgggggcaacctcgggcgagcagtcttccaggccaagaagcgggttctcgaacctctcggtctggttgaggaaggcgctaagacggctcctggaaagaagagaccggtagagccatcaccccagcgttctccagactcctctacgggcatcggcaagaagggccaacagcccgccagaaaaagactcaattttggtcagactggcgactcagagtcagttccagaccctcaacctctcggagaacctccagcagcgccctctggtgtgggacctaatacaatggctgcaggcggtggcgcaccaatggcagacaataacgaaggcgccgacggagtgggtagttcctcgggaaattggcattgcgattccacatggctgggcgacagagtcatcaccaccagcacccgaacctgggccctgcccacctacaacaaccacctctacaagcaaatctccaacgggacatcgggaggagccaccaacgacaacacctacttcggctacagcaccccctgggggtattttgactttaacagattccactgccacttttcaccacgtgactggcagcgactcatcaacaacaactggggattccggcccaagagactcagcttcaagctcttcaacatccaggtcaaggaggtcacgcagaatgaaggcaccaagaccatcgccaataacctcaccagcaccatccaggtgtttacggactcggagtaccagctgccgtacgttctcggctctgcccaccagggctgcctgcctccgttcccggcggacgtgttcacgattccccagtacggctacctaacactcaacaacggtagtcaggccgtgggacgctcctccttctactgcctggaatactttccttcgcagatgctgagaaccggcaacaacttccagtttacttacaccttcgaggacgtgcctttccacagcagctacgcccacagccagagcttggaccggctgatgaatcctctgattgaccagtacctgtactacttgtctcggattcaaacaacaggaggcacggcaaatacgcagactctgggcttcagccaaggtgggcctaatacaatggccaatcaggcaaagaactggctgccaggaccctgttaccgccaacaacgcgtctcaacgacaaccgggcaaaacaacaatagcaactttgcctggactgctgggaccaaataccatctgaatggaagaaattcattggctaatcctggcatcgctatggcaacacacaaagacgacgaggagcgtttttttcccagtaacgggatcctgatttttggcaaacaaaatgctgccagagacaatgcggattacagcgatgtcatgcccaccagcgaggaagaaatcaaaaccactaaccctgtggccacagaggaatacggtatcgtggcagataacttgcagcagcaaaacacggctcctcaaattggaactgtcaacagccagggggccttacccggtatggtctggcagaaccgggacgtgtacctgcagggtcccatctgggccaagattcctcacacggacggcaacttccacccgtctccgctgatgggcggctttggcctgaaacatcctccgcctcagatcctgatcaagaacacgcctgtacctgcggatcctccgaccaccttcaaccagtcaaagctgaactctttcatcacgcaatacagcaccggacaggtcagcgtggaaattgaatgggagctgcagaaggaaaacagcaagcgctggaaccccgagatccagtacacctccaactactacaaatctacaagtgtggaccttgctgttaatacagaaggcgtgtactctgaaccccgccccattggcacccgttacctcacccgtaatctgtaa

SEQ ID NO: 12451 - DNA, 2217 bp, Artificial Sequence
  source: /note="Description of Artificial Sequence: Synthetic polynucleotide"
atggctgccgatggttatcttccagattggctcgaggacaacctctctgagggcattcgcgagtggtgggcgctgaaacctggagccccgaagcccaaagccaaccagcaaaagcaggacgacggccggggtctggtgcttcctggctacaagtacctcggacccttcaacggactcgacaagggggagcccgtcaacgcggcggacgcggcggccctcgagcacgacaaggcctacgaccagcagctgcaggcgggtgacaatccgtacctgcggtataaccacgccgacgccgagtttcaggagcgtctgcaagaagatacgtcttttgggggcaacctcgggcgagcagtcttccaggccaagaagcgggttctcgaacctctcggtctggttgaggaaggcgctaagacggctcctggaaagaagagaccggtagagccatcaccccagcgttctccagactcctctacgggcatcggcaagaagggccaacagcccgccagaaaaagactcaattttggtcagactggcgactcagagtcagttccagaccctcaacctctcggagaacctccagcagcgccctctggtgtgggacctaatacaatggctgcaggcggtggcgcaccaatggcagacaataacgaaggcgccgacggagtgggtagttcctcgggaaattggcattgcgattccacatggctgggcgacagagtcatcaccaccagcacccgaacctgggccctgcccacctacaacaaccacctctacaagcaaatctccaacgggacatcgggaggagccaccaacgacaacacctacttcggctacagcaccccctgggggtattttgactttaacagattccactgccacttttcaccacgtgactggcagcgactcatcaacaacaactggggattccggcccaagagactcagcttcaagctcttcaacatccaggtcaaggaggtcacgcagaatgaaggcaccaagaccatcgccaataacctcaccagcaccatccaggtgtttacggactcggagtaccagctgccgtacgttctcggctctgcccaccagggctgcctgcctccgttcccggcggacgtgttcacgattccccagtacggctacctaacactcaacaacggtagtcaggccgtgggacgctcctccttctactgcctggaatactttccttcgcagatgctgagaaccggcaacaacttccagtttacttacaccttcgaggacgtgcctttccacagcagctacgcccacagccagagcttggaccggctgatgaatcctctgattgaccagtacctgtactacttgtctcggattcaaacaacaggaggcacggcaaatacgcagactctgggcttcagccaaggtgggcctaatacaatggccaatcaggcaaagaactggctgccaggaccctgttaccgccaacaacgcgtctcaacgacaaccgggcaaaacaacaatagcaactttgcctggactgctgggaccaaataccatctgaatggaagaaattcattggctaatcctggcatcgctatggcaacacacaaagacgacgaggagcgtttttttcccagtaacgggatcctgatttttggcaaacaaaatgctgccagagacaatgcggattacagcgatgtcatgcccaccagcgaggaagaaatcaaaaccactaaccctgtggccacagaggaatacggtatcgtggcagataacttgcagcagcaaaacacggctcctcaaattggaactgtcaacagccagggggccttacccggtatggtctggcagaaccgggacgtgtacctgcagggtcccatctgggccaagattcctcacacggacggcaacttccacccgtctccgctgatgggcggctttggcctgaaacatcctccgcctcagatcctgatcaagaacacgcctgtacctgcggatcctccgaccaccttcaaccagtcaaagctgaactctttcatcacgcaatacagcaccggacaggtcagcgtggaaattgaatgggagccgcagaaggaaaacagcaagcgctggaaccccgagatccagtacacctccaactactacaaatctacaagtgtggactttgctgttaatacagaaggcgtgtactctgaaccccgccccattggcacccgttacctcacccgtaatctgtaa

SEQ ID NO: 12452 - DNA, 2217 bp, Artificial Sequence
  source: /note="Description of Artificial Sequence: Synthetic polynucleotide"
atggctgccgatggttatcttccagattggctcgaggacaacctctctgagggcattcgcgagtggtgggcgctgaaacctggagccccgaagcccaaagccaaccagcaaaagcaggacgacggccggggtctggtgcttcctggctacaagtacctcggacccttcaacggactcgacaagggggagcccgtcaacgcggcggacgcggcggccctcgagcacgacaaggcctacgaccagcagctgcaggcgggtgacaatccgtacctgcggtataaccacgccgacgccgagtttcaggagcgtctgcaagaagatacgtcttttgggggcaacctcgggcgagcagtcttccaggccaagaagcgggttctcgaacctctcggtctggttgaggaaggcgctaagacggctcctggaaagaagagaccggtagagccatcaccccagcgttctccagactcctctacgggcatcggcaagaagggccaacagcccgccagaaaaagactcaattttggtcagactggcgactcagagtcagttccagaccctcaacctctcggagaacctccagcagcgccctctggtgtgggacctaatacaatggctgcaggcggtggcgcaccaatggcagacaataacgaaggcgccgacggagtgggtagttcctcgggaaattggcattgcgattccacatggctgggcgacagagtcatcaccaccagcacccgaacctgggccctgcccacctacaacaaccacctctacaagcaaatctccaacgggacatcgggaggagccaccaacgacaacacctacttcggctacagcaccccctgggggtattttgactttaacagattccactgccacttttcaccacgtgactggcagcgacccatcaacaacaactggggattccggcccaagagactcagcttcaagctcttcaacatccaggtcaaggaggtcacgcagaatgaaggcaccaagaccatcgccaataacctcaccagcaccatccaggtgtttacggactcggagtaccagctgccgtacgttctcggctctgcccaccagggctgcctgcctccgttcccggcggacgtgttcacgattccccagtacggctacctaacactcaacaacggtagtcaggccgtgggacgctcctccttctactgcctggaatactttccttcgcagatgctgagaaccggcaacaacttccagtttacttacaccttcgaggacgtgcctttccacagcagctacgcccacagccagagcttggaccggctgatgaatcctctgattgaccagtacctgtactacttgtctcggattcaaacaacaggaggcacggcaaatacgcagactctgggcttcagccaaggtgggcctaatacaatggccaatcaggcaaagaactggctgccaggaccctgttaccgccaacaacgcgtctcaacgacaaccgggcaaaacaacaatagcaactttgcctggactgctgggaccaaataccatctgaatggaagaaattcattggctaatcctggcatcgctatggcaacacacaaagacgacgaggagcgtttttttcccagtaacgggatcctgatttttggcaaacaaaatgctgccagagacaatgcggattacagcgatgtcatgcccaccagcgaggaagaaatcaaaaccactaaccctgtggccacagaggaatacggtatcgtggcagataacttgcagcagcaaaacacggctcctcaaattggaactgtcaacagccagggggccttacccggtatggtctggcagaaccgggacgtgtacctgcagggtcccatctgggccaagattcctcacacggacggcaacttccacccgtctccgctgatgggcggctttggcctgaaacatcctccgcctcagatcctgatcaagaacacgcctgtacctgcggatcctccgaccaccttcaaccagtcaaagctgaactctttcatcacgcaatacagcaccggacaggtcagcgtggaaattgaatgggagctgcagaaggaaaacagcaagcgctggaaccccgagatccagtacacctccaactactacaaatctacaagtgtggactttgctgttaatacagaaggcgtgtactctgaaccccgccccattggcacccgttacctcacccgtaatctgtaa

SEQ ID NO: 12453 - DNA, 2217 bp, Artificial Sequence
  source: /note="Description of Artificial Sequence: Synthetic polynucleotide"
atggctgccgatggttatcttccagattggctcgaggacaacctctctgagggcattcgcgagtggtgggcgctgaaacctggagccccgaagcccaaagccaaccagcaaaagcaggacgacggccggggtctggtgcttcctggctacaagtacctcggacccttcaacggactcgacaagggggagcccgtcaacgcggcggacgcggcggccctcgagcacgacaaggcctacgaccagcagctgcaggcgggtgacaatccgtacctgcggtataaccacgccgacgccgagtttcaggagcgtctgcaagaagatacgtcttttgggggcaacctcgggcgagcagtcttccaggccaagaagcgggttctcgaacctctcggtctggttgaggaaggcgctaagacggctcctggaaagaagagaccggtagagccatcaccccagcgttctccagactcctctacgggcatcggcaagaagggccaacagcccgccagaaaaagactcaattttggtcagactggcgactcagagtcagttccagaccctcaacctctcggagaacctccagcagcgccctctggtgtgggacctaatacaatggctgcaggcggtggcgcaccaatggcagacaataacgaaggcgccgacggagtgggtagttcctcgggaaattggcattgcgattccacatggctgggcgacagagtcatcaccaccagcacccgaacctgggccctgcccacctacaacaaccacctctacaagcaaatctccaacgggacatcgggaggagccaccaacgacaacacctacttcggctacagcaccccctgggggtattttgactttaacagattccactgccacttttcaccacgtgactggcagcgactcatcaacaacaactggggattccggcccaagagactcagcttcaagctcttcaacatccaggtcaaggaggtcacgcagaatgaaggcaccaagaccatcgccaataacctcaccagcaccatccaggtgtttacggactcggagtaccagctgccgtacgttctcggctctgcccaccagggctgcctgcctccgttcccggcggacgtgttcacgattccccagtacggctacctaacactcaacaacggtagtcaggccgtgggacgctcctccttctactgcctggaatactttccttcgcagatgctgagaaccggcaacaacttccagtttacttacaccttcgaggacgtgcctttccacagcagctacgcccacagccagagcttggaccggctgatgaatcctctgattgaccagtacctgtactacttgtctcggattcaaacaacaggaggcacggcaaatacgcagactctgggcttcagccaaggtgggcctaatacaatggccaatcaggcaaagaactggctgccaggaccctgttaccgccaacaacgcgtctcaacgacaaccgggcaaaacaacaatagcaactttgcctggactgctgggaccaaataccatctgaatggaagaaattcattggctaatcctggcatcgctatggcaacacacaaagacgacgaggagcgtttttttcccagtaacgggatcctgatttttggcaaacaaaatgctgccagagacaatgcggattacagcgatgtcatgcccaccagcgaggaagaaatcaaaaccactaaccctgcggccacagaggaatacggtatcgtggcagataacttgcagcagcaaaacacggctcctcaaattggaactgtcaacagccagggggccttacccggtatggtctggcagaaccgggacgtgtacctgcagggtcccatctgggccaagattcctcacacggacggcaacttccacccgtctccgctgatgggcggctttggcctgaaacatcctccgcctcagatcctgatcaagaacacgcctgtacctgcggatcctccgaccaccttcaaccagtcaaagctgaactctttcatcacgcaatacagcaccggacaggtcagcgtggaaattgaatgggagctgcagaaggaaaacagcaagcgctggaaccccgagatccagtacacctccaactactacaaatctacaagtgtggactttgctgttaatacagaaggcgtgtactctgaaccccgccccattggcacccgttacctcacccgtaatctgtaa

SEQ ID NO: 12454 - DNA, 2217 bp, Artificial Sequence
  source: /note="Description of Artificial Sequence: Synthetic polynucleotide"
atggctgccgatggttatcttccagattggctcgaggacaacctctctgagggcattcgcgagtggtgggcgctgaaacctggagccccgaagcccaaagccaaccagcaaaagcaggacgacggccggggtctggtgcttcctggctacaagtacctcggacccttcaacggactcgacaagggggagcccgtcaacgcggcggacgcggcggccctcgagcacgacaaggcctacgaccagcagctgcaggcgggtgacaatccgtacctgcggtataaccacgccgacgccgagtttcaggagcgtctgcaagaagatacgtcttttgggggcaacctcgggcgagcagtcttccaggccaagaagcgggttctcgaacctctcggtctggttgaggaaggcgctaagacggctcctggaaagaagagaccggtagagccatcaccccagcgttctccagactcctctacgggcatcggcaagaagggccaacagcccgccagaaaaagactcaattttggtcagactggcgactcagagtcagttccagaccctcaacctctcggagaacctccagcagcgccctctggtgtgggacctaatacaatggctgcaggcggtggcgcaccaatggcagacaataacgaaggcgccgacggagtgggtagttcctcgggaaattggcattgcgattccacatggctgggcgacagagtcatcaccaccagcacccgaacctgggccctgcccacctacaacaaccacctctacaagcaaatctccaacgggacatcgggaggagccaccaacgacaacacctacttcggctacagcaccccctgggggtattttgactttaacagattccactgccacttttcaccacgtgactggcagcgactcatcaacaacaactggggattccggcccaagagactcagcttcaagctcttcaacatccaggtcaaggaggtcacgcagaatgaaggcaccaagaccatcgccaataacctcaccagcaccatccaggtgtttacggactcggagtaccagctgccgtacgttctcggctctgcccaccagggctgcctgcctccgttcccggcggacgtgttcacgattccccagtacgactacctaacactcaacaacggtagtcaggccgtgggacgctcctccttctactgcctggaatactttccttcgcagatgctgagaaccggcaacaacttccagtttacttacaccttcgaggacgtgcctttccacagcagctacgcccacagccagagcttggaccggctgatgaatcctctgattgaccagtacctgtactacttgtctcggattcaaacaacaggaggcacggcaaatacgcagactctgggcttcagccaaggtgggcctaatacaatggccaatcaggcaaagaactggctgccaggaccctgttaccgccaacaacgcgtctcaacgacaaccgggcaaaacaacaatagcaactttgcctggactgctgggaccaaataccatctgaatggaagaaattcattggctaatcctggcatcgctatggcaacacacaaagacgacgaggagcgtttttttcccagtaacgggatcctgatttttggcaaacaaaatgctgccagagacaatgcggattacagcgatgtcatgcccaccagcgaggaagaaatcaaaaccactaaccctgtggccacagaggaatacggtatcgtggcagataacttgcagcagcaaaacacggctcctcaaattggaactgtcaacagccagggggccttacccggtatggtctggcagaaccgggacgtgtacctgcagggtcccatctgggccaagattcctcacacggacggcaacttccacccgtctccgctgatgggcggctttggcctgaaacatcctccgcctcagatcctgatcaagaacacgcctgtacctgcggatcctccgaccaccttcaaccagtcaaagctgaactctttcatcacgcaatacagcaccggacaggtcagcgtggaaattgaatgggagctgcagaaggaaaacagcaagcgctggaaccccgagatccagtacacctccaactactacaaatctacaagtgtggactttgctgttaatacagaaggcgtgtactctgaaccccgccccattggcacccgttacctcacccgtaatctgtaa

SEQ ID NO: 12455 - DNA, 2217 bp, Artificial Sequence
  source: /note="Description of Artificial Sequence: Synthetic polynucleotide"
atggctgccgatggttatcttccagattggctcgaggacaacctctctgagggcattcgcgagtggtgggcgctgaaacctggagccccgaagcccaaagccaaccagcaaaagcaggacgacggccggggtctggtgcttcctggctacaagtacctcggacccttcaacggactcgacaagggggagcccgtcaacgcggcggacgcggcggccctcgagcacgacaaggcctacgaccagcagctgcaggcgggtgacaatccgtacctgcggtataaccacgccgacgccgagtttcaggagcgtctgcaagaagatacgtcttttgggggcaacctcgggcgagcagtcttccaggccaagaagcgggttctcgaacctctcggtctggttgaggaaggcgctaagacggctcctggaaagaagagaccggtagagccatcaccccagcgttctccagactcctctacgggcatcggcaagaagggccaacagcccgccagaaaaagactcaattttggtcagactggcgactcagggtcagttccagaccctcaacctctcggagaacctccagcagcgccctctggtgtgggacctaatacaatggctgcaggcggtggcgcaccaatggcagacaataacgaaggcgccgacggagtgggtagttcctcgggaaattggcattgcgattccacatggctgggcgacagagtcatcaccaccagcacccgaacctgggccctgcccacctacaacaaccacctctacaagcaaatctccaacgggacatcgggaggagccaccaacgacaacacctacttcggctacagcaccccctgggggtattttgactttaacagattccactgccacttttcaccacgtgactggcagcgactcatcaacaacaactggggattccggcccaagagactcagcttcaagctcttcaacatccaggtcaaggaggtcacgcagaatgaaggcaccaagaccatcgccaataacctcaccagcaccatccaggtgtttacggactcggagtaccagctgccgtacgttctcggctctgcccaccagggctgcctgcctccgttcccggcggacgtgttcacgattccccagtacggctacctaacactcaacaacggtagtcaggccgtgggacgctcctccttctactgcctggaatactttccttcgcagatgctgagaaccggcaacaacttccagtttacttacaccttcgaggacgtgcctttccacagcagctacgcccacagccagagcttggaccggctgatgaatcctctgattgaccagtacctgtactacttgtctcggattcaaacaacaggaggcacggcaaatacgcagactctgggcttcagccaaggtgggcctaatacaatggccaatcaggcaaagaactggctgccaggaccctgttaccgccaacaacgcgtctcaacgacaaccgggcaaaacaacaatagcaactttgcctggactgctgggaccaaataccatctgaatggaagaaattcattggctaatcctggcatcgctatggcaacacacaaagacgacgaggagcgtttttttcccagtaacgggatcctgatttttggcaaacaaaatgctgccagagacaatgcggattacagcgatgtcatgcccaccagcgaggaagaaatcaaaaccactaaccctgtggccacagaggaatacggtatcgtggcagataacttgcagcagcaaaacacggctcctcaaattggaactgtcaacagccagggggccttacccggtatggtctggcagaaccgggacgtgtacctgcagggtcccatctgggccaagattcctcacacggacggcaacttccacccgtctccgctgatgggcggctttggcctgaaacatcctccgcctcagatcctgatcaagaacacgcctgtacctgcggatcctccgaccaccttcaaccagtcaaagctgaactctttcatcacgcaatacagcaccggacaggtcagcgtggaaattgaatgggagctgcagaaggaaaacagcaagcgctggaaccccgagatccagtacacctccaactactacaaatctacaagtgtggactttgctgttaatacagaaggcgtgtactctgaaccccgccccattggcacccgttacctcacccgtaatctgtaa

SEQ ID NO: 12456 - DNA, 2217 bp, Artificial Sequence
  source: /note="Description of Artificial Sequence: Synthetic polynucleotide"
atggctgccgatggttatcttccagattggctcgaggacaacctctctgagggcattcgcgagtggtgggcgctgaaacctggagccccgaagcccaaagccaaccagcaaaagcaggacgacggccggggtctggtgcttcctggctacaagtacctcggacccttcaacggactcgacaagggggagcccgtcaacgcggcggacgcggcggccctcgagcacgacaaggcctacgaccagcagctgcaggcgggtgacaatccgtacctgcggtataaccacgccgacgccgagtttcaggagcgtctgcaagaagatacgtcttttgggggcaacctcgggcgagcagtcttccaggccaagaagcgggttctcgaacctctcggtctggttgaggaaggcgctaagacggctcctggaaagaagagaccggtagagccatcaccccagcgttctccagactcctctacgggcatcggcaagaagggccaacagcccgccagaaaaagactcaattttggtcagactggcgactcagagtcagttccagaccctcaacctctcggagaacctccagcagcgccctctggtgtgggacctaatacaatggctgcaggcggtggcgcaccaatggcagacaataacgaaggcgccgacggagtgggtagttcctcgggaaattggcattgcgattccacatggctgggcgacagagtcatcaccaccagcacccgaacctgggccctgcccacctacaacaaccacctctacaagcaaatctccaacgggacatcgggaggagccaccaacgacaacacctacttcggctacagcaccccctgggggtattttgactttaacagattccactgccacttttcaccacgtgactggcagcgactcatcaacaacaactggggattccggcccaagagactcagcttcaagctcttcaacatccaggtcaaggaggtcacgcagaatgaaggcaccaaggccatcgccaataacctcaccagcaccatccaggtgtttacggactcggagtaccagctgccgtacgttctcggctctgcccaccagggctgcctgcctccgttcccggcggacgtgttcacgattccccagtacggctacctaacactcaacaacggtagtcaggccgtgggacgctcctccttctactgcctggaatactttccttcgcagatgctgagaaccggcaacaacttccagtttacttacaccttcgaggacgtgcctttccacagcagctacgcccacagccagagcttggaccggctgatgaatcctctgattgaccagtacctgtactacttgtctcggattcaaacaacaggaggcacggcaaatacgcagactctgggcttcagccaaggtgggcctaatacaatggccaatcaggcaaagaactggctgccaggaccctgttaccgccaacaacgcgtctcaacgacaaccgggcaaaacaacaatagcaactttgcctggactgctgggaccaaataccatctgaatggaagaaattcattggctaatcctggcatcgctatggcaacacacaaagacgacgaggagcgtttttttcccagtaacgggatcctgatttttggcaaacaaaatgctgccagagacaatgcggattacagcgatgtcatgcccaccagcgaggaagaaatcaaaaccactaaccctgtggccacagaggaatacggtatcgtggcagataacttgcagcagcaaaacacggctcctcaaattggaactgtcaacagccagggggccttacccggtatggtctggcagaaccgggacgtgtacctgcagggtcccatctgggccaagattcctcacacggacggcaacttccacccgtctccgctgatgggcggctttggcctgaaacatcctccgcctcagatcctgatcaagaacacgcctgtacctgcggatcctccgaccaccttcaaccagtcaaagctgaactctttcatcacgcaatacagcaccggacaggtcagcgtggaaattgaatgggagctgcagaaggaaaacagcaagcgctggaaccccgagatccagtacacctccaactactacaaatctacaagtgtggactttgctgttaatacagaaggcgtgtactctgaaccccgccccattggcacccgttacctcacccgtaatctgtaa

SEQ ID NO: 12457 - DNA, 2217 bp, Artificial Sequence
  source: /note="Description of Artificial Sequence: Synthetic polynucleotide"
atggctgccgatggttatcttccagattggctcgaggacaacctctctgagggcattcgcgagtggtgggcgctgaaacctggagccccgaagcccaaagccaaccagcaaaagcaggacgacggccggggtccggtgcttcctggctacaagtacctcggacccttcaacggactcgacaagggggagcccgtcaacgcggcggacgcggcggccctcgagcacgacaaggcctacgaccagcagctgcaggcgggtgacaatccgtacctgcggtataaccacgccgacgccgagtttcaggagcgtctgcaagaagatacgtcttttgggggcaacctcgggcgagcagtcttccaggccaagaagcgggttctcgaacctctcggtctggttgaggaaggcgctaagacggctcctggaaagaagagaccggtagagccatcaccccagcgttctccagactcctctacgggcatcggcaagaagggccaacagcccgccagaaaaagactcaattttggtcagactggcgactcagagtcagttccagaccctcaacctctcggagaacctccagcagcgccctctggtgtgggacctaatacaatggctgcaggcggtggcgcaccaatggcagacaataacgaaggcgccgacggagtgggtagttcctcgggaaattggcattgcgattccacatggctgggcgacagagtcatcaccaccagcacccgaacctgggccctgcccacctacaacaaccacctctacaagcaaatctccaacgggacatcgggaggagccaccaacgacaacacctacttcggctacagcaccccctgggggtattttgactttaacagattccactgccacttttcaccacgtgactggcagcgactcatcaacaacaactggggattccggcccaagagactcagcttcaagctcttcaacatccaggtcaaggaggtcacgcagaatgaaggcaccaagaccatcgccaataacctcaccagcaccatccaggtgtttacggactcggagtaccagctgccgtacgttctcggctctgcccaccagggctgcctgcctccgttcccggcggacgtgttcacgattccccagtacggctacctaacactcaacaacggtagtcaggccgtgggacgctcctccttctactgcctggaatactttccttcgcagatgctgagaaccggcaacaacttccagtttacttacaccttcgaggacgtgcctttccacagcagctacgcccacagccagagcttggaccggctgatgaatcctctgattgaccagtacctgtactacttgtctcggattcaaacaacaggaggcacggcaaatacgcagactctgggcttcagccaaggtgggcctaatacaatggccaatcaggcaaagaactggctgccaggaccctgttaccgccaacaacgcgtctcaacgacaaccgggcaaaacaacaatagcaactttgcctggactgctgggaccaaataccatctgaatggaagaaattcattggctaatcctggcatcgctatggcaacacacaaagacgacgaggagcgtttttttcccagtaacgggatcctgatttttggcaaacaaaatgctgccagagacaatgcggattacagcgatgtcatgcccaccagcgaggaagaaatcaaaaccactaaccctgtggccacagaggaatacggtatcgtggcagataacttgcagcagcaaaacacggctcctcaaattggaactgtcaacagccagggggccttacccggtatggtctggcagaaccgggacgtgtacctgcagggtcccatctgggccaagattcctcacacggacggcaacttccacccgtctccgctgatgggcggctttggcctgaaacatcctccgcctcagatcctgatcaagaacacgcctgtacctgcggatcctccgaccaccttcaaccagtcaaagctgaactctttcatcacgcaatacagcaccggacaggtcagcgtggaaattgaatgggagctgcagaaggaaaacagcaagcgctggaaccccgagatccagtacacctccaactactacaaatctacaagtgtggactttgctgttaatacagaaggcgtgtactctgaaccccgccccattggcacccgttacctcacccgtaatctgtaa

SEQ ID NO: 12458 - DNA, 2217 bp, Artificial Sequence
  source: /note="Description of Artificial Sequence: Synthetic polynucleotide"
atggctgccgatggttatcttccagattggctcgaggacaacctctctgagggcattcgcgagtggtgggcgctgaaacctggagccccgaagcccaaagccaaccagcaaaagcaggacgacggccggggtctggtgcttcctggctacaagtacctcggacccttcaacggactcgacaagggggagcccgtcaacgcggcggacgcggcggccctcgagcacgacaaggcctacgaccagcagctgcaggcgggtgacaatccgtacctgcggtataaccacgccgacgccgagtttcaggagcgtctgcaagaagatacgtcttttgggggcaacctcgggcgagcagtcttccaggccaagaagcgggttctcgaacctctcggtctggttgaggaaggcgctaagacggctcctggaaagaagagaccggtagagccatcaccccagcgttctccagactcctctacgggcatcggcaagaagggccaacagcccgccagaaaaagactcaattttggtcagactggcgactcagagtcagttccagaccctcaacctctcggagaacctccagcagcgccctctggtgtgggacctaatacaatggctgcaggcggtggcgcaccaatggcagacaataacgaaggcgccgacggagtgggtagttcctcgggaaattggcattgcgattccacatggctgggcgacagagtcatcaccaccagcacccgaacctgggccctgcccacctacaacaaccacctctacaagcaaatctccaacgggacatcgggaggagccaccaacgacaacacctacttcggctacagcaccccctgggggtattttgactttaacagattccactgccacttttcaccacgtgactggcagcgactcatcaacaacaactggggattccggcccaagagactcagcttcaagctcttcaacatccaggtcaaggaggtcacgcagaatgaaggcaccaagaccatcgccaataacctcaccagcaccatccaggtgtttacggactcggagtaccagctgccgtacgttctcggctctgcccaccagggctgcctgcctccgttcccggcggacgtgttcacgattccccagtacggctacctaacactcaacaacggtagtcaggccgtgggacgctcctccttctactgcctggaatactttccttcgcagatgctgagaaccggcaacaacttccagtttacttacaccttcgaggacgtgcctttccacagcagctacgcccacagccagagcttggaccggctgatgaatcctctgattgaccagtacctgtactacttgtctcggattcaaacaacaggaggcacggcaaatacgcagactctgggcttcagccaaggtgggcctaatacaatggccaatcgggcaaagaactggctgccaggaccctgttaccgccaacaacgcgtctcaacgacaaccgggcaaaacaacaatagcaactttgcctggactgctgggaccaaataccatctgaatggaagaaattcattggctaatcctggcatcgctatggcaacacacaaagacgacgaggagcgtttttttcccagtaacgggatcctgatttttggcaaacaaaatgctgccagagacaatgcggattacagcgatgtcatgcccaccagcgaggaagaaatcaaaaccactaaccctgtggccacagaggaatacggtatcgtggcagataacttgcagcagcaaaacacggctcctcaaattggaactgtcaacagccagggggccttacccggtatggtctggcagaaccgggacgtgtacctgcagggtcccatctgggccaagattcctcacacggacggcaacttccacccgtctccgctgatgggcggctttggcctgaaacatcctccgcctcagatcctgatcaagaacacgcctgtacctgcggatcctccgaccaccttcaaccagtcaaagctgaactctttcatcacgcaatacagcaccggacaggtcagcgtggaaattgaatgggagctgcagaaggaaaacagcaagcgctggaaccccgagatccagtacacctccaactactacaaatctacaagtgtggactttgctgttaatacagaaggcgtgtactctgaaccccgccccattggcacccgttacctcacccgtaatctgtaa

SEQ ID NO: 12459 - DNA, 2217 bp, Artificial Sequence
  source: /note="Description of Artificial Sequence: Synthetic polynucleotide"
atggctgccgatggttatcttccagattggctcgaggacaacctctctgagggcattcgcgagtggtgggcgctgaaacctggagccccgaagcccaaagccaaccagcaaaagcaggacgacggccggggtctggtgcttcctggctacaagtacctcggacccttcaacggactcgacaagggggagcccgtcaacgcggcggacgcggcggccctcgagcacgacaaggcctacgaccagcagctgcaggcgggtgacaatccgtacctgcggtataaccacgccgacgccgagtttcaggagcgtctgcaagaagatacgtcttttgggggcaacctcgggcgagcagtcttccaggccaagaagcgggttctcgaacctctcggtctggttgaggaaggcgctaagacggctcctggaaagaagagaccggtagagccatcaccccagcgttctccagactcctctacgggcatcggcaagaagggccaacagcccgccagaaaaagactcaattttggtcagactggcgactcagagtcagttccagaccctcaacctctcggagaacctccagcagcgccctctggtgtgggacctaatacaatggctgcaggcggtggcgcaccaatggcagacaataacgaaggcgccgacggagtgggtagttcctcgggaaattggcattgcgattccacatggctgggcgacagagtcatcaccaccagcacccgaacctgggccctgcccacctacaacaaccacctctacaagcaaatctccaacgggacatcgggaggagccaccaacgacaacacctacttcggctacagcaccccctgggggtattttgactttaacagattccactgccacttttcaccacgtgactggcagcgactcatcaacaacaactggggattccggcccaagagactcagcttcaagctcttcaacatccaggtcaaggaggtcacgcagaatgaaggcaccaagaccatcgccaataacctcaccagcaccatccaggtgtttacggactcggagtaccagctgccgtacgttctcggctctgcccaccagggctgcctgcctccgttcccggcggacgtgttcacgattccccagtacggctacctaacactcaacaacggtagtcaggccgtgggacgctcctccttctactgcctggaatactttccttcgcagatgctgagaaccggcaacaacttccagtttacttacaccttcgaggacgtgcctttccacagcagctacgcccacagccagagcttggaccggctgatgaatcctctgattgaccagtacctgtactacttgtctcggattcaaacaacaggaggcacggcaaatacgcagactctgggcttcagccaaggtgggcctaatacaatggccaatcaggcaaagaactggctgccaggaccctgttaccgccaacaacgcgtctcaacgacaaccgggcaaaacaacaatagcaactttgcccggactgctgggaccaaataccatctgaatggaagaaattcattggctaatcctggcatcgctatggcaacacacaaagacgacgaggagcgtttttttcccagtaacgggatcctgatttttggcaaacaaaatgctgccagagacaatgcggattacagcgatgtcatgcccaccagcgaggaagaaatcaaaaccactaaccctgtggccacagaggaatacggtatcgtggcagataacttgcagcagcaaaacacggctcctcaaattggaactgtcaacagccagggggccttacccggtatggtctggcagaaccgggacgtgtacctgcagggtcccatctgggccaagattcctcacacggacggcaacttccacccgtctccgctgatgggcggctttggcctgaaacatcctccgcctcagatcctgatcaagaacacgcctgtacctgcggatcctccgaccaccttcaaccagtcaaagctgaactctttcatcacgcaatacagcaccggacaggtcagcgtggaaattgaatgggagctgcagaaggaaaacagcaagcgctggaaccccgagatccagtacacctccaactactacaaatctacaagtgtggactttgctgttaatacagaaggcgtgtactctgaaccccgccccattggcacccgttacctcacccgtaatctgtaa

SEQ ID NO: 12460 - DNA, 2217 bp, Artificial Sequence
  source: /note="Description of Artificial Sequence: Synthetic polynucleotide"
atggctgccgatggttatcttccagattggctcgaggacaacctctctgagggcattcgcgagtggtgggcgctgaaacctggagccccgaagcccaaagccaaccagcaaaagcaggacgacggccggggtctggtgcttcctggctacaagtacctcggacccttcaacggactcgacaagggggagcccgtcaacgcggcggacgcggcggccctcgagcacgacaaggcctacgaccagcagctgcaggcgggtgacaatccgtacctgcggtataaccacgccgacgccgagtttcaggagcgtctgcaagaagatacgtcttttgggggcaacctcgggcgagcagtcttccaggccaagaagcgggttctcgaacctctcggtctggttgaggaaggcgctaagacggctcctggaaagaagagaccggtagagccatcaccccagcgttctccagactcctctacgggcatcggcaagaagggccaacagcccgccagaaaaagactcaattttggtcagactggcgactcagagtcagttccagaccctcaacctctcggagaacctccagcagcgccctctggtgtgggacctaatacaatggctgcaggcggtggcgcaccaatggcagacaataacgaaggcgccgacggagtgggtagttcctcgggaaattggcattgcgattccacatggctgggcgacagagtcatcaccaccagcacccgaacctgggccctgcccacctacaacaaccacctctacaagcaaatctccaacgggacatcgggaggagccaccaacgacaacacctacttcggctacagcaccccctgggggtattttgactttaacagatcccactgccacttttcaccacgtgactggcagcgactcatcaacaacaactggggattccggcccaagagactcagcttcaagctcttcaacatccaggtcaaggaggtcacgcagaatgaaggcaccaagaccatcgccaataacctcaccagcaccatccaggtgtttacggactcggagtaccagctgccgtacgttctcggctctgcccaccagggctgcctgcctccgttcccggcggacgtgttcacgattccccagtacggctacctaacactcaacaacggtagtcaggccgtgggacgctcctccttctactgcctggaatactttccttcgcagatgctgagaaccggcaacaacttccagtttacttacaccttcgaggacgtgcctttccacagcagctacgcccacagccagagcttggaccggctgatgaatcctctgattgaccagtacctgtactacttgtctcggattcaaacaacaggaggcacggcaaatacgcagactctgggcttcagccaaggtgggcctaatacaatggccaatcaggcaaagaactggctgccaggaccctgttaccgccaacaacgcgtctcaacgacaaccgggcaaaacaacaatagcaactttgcctggactgctgggaccaaataccatctgaatggaagaaattcattggctaatcctggcatcgctatggcaacacacaaagacgacgaggagcgtttttttcccagtaacgggatcctgatttttggcaaacaaaatgctgccagagacaatgcggattacagcgatgtcatgcccaccagcgaggaagaaatcaaaaccactaaccctgtggccacagaggaatacggtatcgtggcagataacttgcagcagcaaaacacggctcctcaaattggaactgtcaacagccagggggccttacccggtatggtctggcagaaccgggacgtgtacctgcagggtcccatctgggccaagattcctcacacggacggcaacttccacccgtctccgctgatgggcggctttggcctgaaacatcctccgcctcagatcctgatcaagaacacgcctgtacctgcggatcctccgaccaccttcaaccagtcaaagctgaactctttcatcacgcaatacagcaccggacaggtcagcgtggaaattgaatgggagctgcagaaggaaaacagcaagcgctggaaccccgagatccagtacacctccaactactacaaatctacaagtgtggactttgctgttaatacagaaggcgtgtactctgaaccccgccccattggcacccgttacctcacccgtaatctgtaa

SEQ ID NO: 12461 - DNA, 2217 bp, Artificial Sequence
  source: /note="Description of Artificial Sequence: Synthetic polynucleotide"
atggctgccgatggttatcttccagattggctcgaggacaacctctctgagggcattcgcgagtggtgggcgctgaaacctggagccccgaagcccaaagccaaccagcaaaagcaggacgacggccggggtctggtgcttcctggctacaagtacctcggacccttcaacggactcgacaagggggagcccgtcaacgcggcggacgcggcggccctcgagcacgacaaggcctacgaccagcagctgcaggcgggtgacaatccgtacctgcggtataaccacgccgacgccgagtttcaggagcgtctgcaagaagatacgtcttttgggggcaacctcgggcgagcagtcttccaggccaagaagcgggttctcgaacctctcggtctggttgaggaaggcgctaagacggctcctggaaagaagagaccggtagagccatcaccccagcgttctccagactcctctacgggcatcggcaagaagggccaacagcccgccagaaaaagactcaattttggtcagactggcgactcagagtcagttccagaccctcaacctctcggagaacctccagcagcgccctctggtgtgggacctaatacaatggctgcaggcggtggcgcaccaatggcagacaataacgaaggcgccgacggagtgggtagttcctcgggaaattggcattgcgattccacatggctgggcgacagagtcatcaccaccagcacccgaacctgggccctgcccacctacaacaaccacctctacaagcaaatctccaacgggacatcgggaggagccaccaacgacaacacctacttcggctacagcaccccctgggggtattttgactttaacagattccactgccacttttcaccacgtgactggcagcgactcatcaacaacaactggggattccggcccaagagactcagcttcaagctcttcaacatccaggtcaaggaggtcacgcagaatgaaggcaccaagaccatcgccaataacctcaccagcaccatccaggtgtttacggactcggagtaccagctgccgtacgttctcggctctgcccaccagggctgcctgcctccgttcccggcggacgtgttcacgattccccagtacggctacctaacactcaacaacggtagtcaggccgtgggacgctcctccttctactgcctggaatactttccttcgcagatgctgagaaccggcaacaacttccagtttacttacaccttcgaggacgtgcctttccacagcagctacgcccacagccagagcttggaccggctgatgaatcctctgattgaccagtacctgtactacttgtctcggattcaaacaacaggaggcacggcaaatacgcagactctgggcttcggccaaggtgggcctaatacaatggccaatcaggcaaagaactggctgccaggaccctgttaccgccaacaacgcgtctcaacgacaaccgggcaaaacaacaatagcaactttgcctggactgctgggaccaaataccatctgaatggaagaaattcattggctaatcctggcatcgctatggcaacacacaaagacgacgaggagcgtttttttcccagtaacgggatcctgatttttggcaaacaaaatgctgccagagacaatgcggattacagcgatgtcatgcccaccagcgaggaagaaatcaaaaccactaaccctgtggccacagaggaatacggtatcgtggcagataacttgcagcagcaaaacacggctcctcaaattggaactgtcaacagccagggggccttacccggtatggtctggcagaaccgggacgtgtacctgcagggtcccatctgggccaagattcctcacacggacggcaacttccacccgtctccgctgatgggcggctttggcctgaaacatcctccgcctcagatcctgatcaagaacacgcctgtacctgcggatcctccgaccaccttcaaccagtcaaagctgaactctttcatcacgcaatacagcaccggacaggtcagcgtggaaattgaatgggagctgcagaaggaaaacagcaagcgctggaaccccgagatccagtacacctccaactactacaaatctacaagtgtggactttgctgttaatacagaaggcgtgtactctgaaccccgccccattggcacccgttacctcacccgtaatctgtaa

SEQ ID NO: 12462 - DNA, 2217 bp, Artificial Sequence
  source: /note="Description of Artificial Sequence: Synthetic polynucleotide"
atggctgccgatggttatcttccagattggctcgaggacaacctctctgagggcattcgcgagtggtgggcgctgaaacctggagccccgaagcccaaagccaaccagcaaaagcaggacgacggccggggtctggtgcttcctggctacaagtacctcggacccttcaacggactcgacaagggggagcccgtcaacgcggcggacgcggcggccctcgagcacgacaaggcctacgaccagcagctgcaggcgggtgacaatccgtacctgcggtataaccacgccgacgccgagtttcaggagcgtctgcaagaagatacgtcttttgggggcaacctcgggcgagcagtcttccaggccaagaagcgggttctcgaacctctcggtctggttgaggaaggcgctaagacggctcctggaaagaagagaccggtagagccatcaccccagcgttctccagactcctctacgggcatcggcaagaagggccaacagcccgccagaaaaagactcaattttggtcagactggcgactcagagtcagttccagaccctcaacctctcggagaacctccagcagcgccctctggtgtgggacctaatacaatggctgcaggcggtggcgcaccaatggcagacaataacgaaggcgccgacggagtgggtagttcctcgggaaattggcattgcgattccacatggctgggcgacagagtcatcaccaccagcacccgaacctgggccctgcccacctacaacaaccacctctacaagcaaatctccaacgggacatcgggaggagccaccaacgacaacacctacttcggctacagcaccccctgggggtattttgactttaacagattccactgccacttttcaccacgtgactggcagcgactcatcaacaacaactggggattccggcccaagagactcagcttcaagctcttcaacatccaggtcaaggaggtcacgcagaatgaaggcaccaagaccatcgccaataacctcaccagcaccatccaggtgtttacggactcggagtaccagctgccgtacgttctcggctctgcccaccagggctgcctgcctccgttcccggcggacgtgttcacgattccccagtacggctacctaacactcaacaacggtagtcaggccgtgggacgctcctccttctactgcctggaatactttccttcgcagatgctgagaaccggcaacaacttccagtttacttacaccttcgaggacgtgcctttccacagcagctacgcccacagccagagcttggaccggctgatgaatcctctgattgaccagtacctgtactacttgtctcggattcaaacaacaggaggcacggcaaatacgcagactctgggcttcagccaaggtgggcctaatacaatggccaatcaggcaaagaactggctgccaggaccctgttaccgccaacaacgcgcctcaacgacaaccgggcaaaacaacaatagcaactttgcctggactgctgggaccaaataccatctgaatggaagaaattcattggctaatcctggcatcgctatggcaacacacaaagacgacgaggagcgtttttttcccagtaacgggatcctgatttttggcaaacaaaatgctgccagagacaatgcggattacagcgatgtcatgcccaccagcgaggaagaaatcaaaaccactaaccctgtggccacagaggaatacggtatcgtggcagataacttgcagcagcaaaacacggctcctcaaattggaactgtcaacagccagggggccttacccggtatggtctggcagaaccgggacgtgtacctgcagggtcccatctgggccaagattcctcacacggacggcaacttccacccgtctccgctgatgggcggctttggcctgaaacatcctccgcctcagatcctgatcaagaacacgcctgtacctgcggatcctccgaccaccttcaaccagtcaaagctgaactctttcatcacgcaatacagcaccggacaggtcagcgtggaaattgaatgggagctgcagaaggaaaacagcaagcgctggaaccccgagatccagtacacctccaactactacaaatctacaagtgtggactttgctgttaatacagaaggcgtgtactctgaaccccgccccattggcacccgttacctcacccgtaatctgtaa

SEQ ID NO: 12463 - DNA, 2217 bp, Artificial Sequence
  source: /note="Description of Artificial Sequence: Synthetic polynucleotide"
atggctgccgatggttatcttccagattggctcgaggacaacctctctgagggcattcgcgagtggtgggcgctgaaacctggagccccgaagcccaaagccaaccagcaaaagcaggacgacggccggggtctggtgcttcctggctacaagtacctcggacccttcaacggactcgacaagggggagcccgtcaacgcggcggacgcggcggccctcgagcacgacaaggcctacgaccagcagctgcaggcgggtgacaatccgtacctgcggtataaccacgccgacgccgagtttcaggagcgtctgcaagaagatacgtcttttgggggcaacctcgggcgagcagtcttccaggccaagaagcgggttctcgaacctctcggtctggttgaggaaggcgctaagacggctcctggaaagaagagaccggtagagccatcaccccagcgttctccagactcctctacgggcatcggcaagaagggccaacagcccgccagaaaaagactcaattttggtcagactggcgactcagagtcagttccagaccctcaacctctcggagaacctccagcagcgccctctggtgtgggacctaatacaatggctgcaggcggtggcgcaccaatggcagacaataacgaaggcgccgacggagtgggtagttcctcgggaaattggcattgcgattccacatggctgggcgacagagtcatcaccaccagcacccgaacctgggccctgcccacctacaacaaccacctctacaagcaaatctccaacgggacatcgggaggagccaccaacgacaacacctacttcggctacagcaccccctgggggtattttgactttaacagattccactgccacttttcaccacgtgactggcagcgactcatcaacaacaactggggattccggcccaagagactcagcttcaagctcttcaacatccaggtcaaggaggtcacgcagaatgaaggcaccaagaccatcgccaataacctcaccagcaccatccaggtgtttacggactcggagtaccagctgccgtacgttctcggctctgcccaccagggctgcctgcctccgttcccggcggacgtgttcacgattccccagtacggctacctaacactcaacaacggtagtcaggccgtgggacgctcctccttctactgcctggaatactttccttcgcagatgctgagaaccggcaacaacttccagtttacttacaccttcgaggacgtgcctttccacagcagctacgcccacagccagagcttggaccggctgatgaatcctctgattgaccagtacctgtactacttgtctcggattcaaacaacaggaggcacggcaaatacgcagactctgggcttcagccaaggtgggcctaatacaatggccaatcaggcaaagaactggctgccaggaccctgttaccgccaacaacgcgtctcaacgacaaccgggcaaaacaacaatagcaactttgcctggactgctgggaccaaataccatctgaatggaagaaattcattggctaatcctggcatcgctatggcaacacacaaagacgacgaggagcgtttttttcccagtaacgggatcctgatttttggcaaacaaaatgctgccagagacaatgcggattacagcgatgtcatacccaccagcgaggaagaaatcaaaaccactaaccctgtggccacagaggaatacggtatcgtggcagataacttgcagcagcaaaacacggctcctcaaattggaactgtcaacagccagggggccttacccggtatggtctggcagaaccgggacgtgtacctgcagggtcccatctgggccaagattcctcacacggacggcaacttccacccgtctccgctgatgggcggctttggcctgaaacatcctccgcctcagatcctgatcaagaacacgcctgtacctgcggatcctccgaccaccttcaaccagtcaaagctgaactctttcatcacgcaatacagcaccggacaggtcagcgtggaaattgaatgggagctgcagaaggaaaacagcaagcgctggaaccccgagatccagtacacctccaactactacaaatctacaagtgtggactttgctgttaatacagaaggcgtgtactctgaaccccgccccattggcacccgttacctcacccgtaatctgtaa

SEQ ID NO: 12464 - DNA, 2217 bp, Artificial Sequence
  source: /note="Description of Artificial Sequence: Synthetic polynucleotide"
atggctgccgatggttatcttccagattggctcgaggacaacctctctgagggcattcgcgagtggtgggcgctgaaacctggagccccgaagcccaaagccaaccagcaaaagcaggacgacggccggggtctggtgcttcctggctacaagtacctcggacccttcaacggactcgacaagggggagcccgtcaacgcggcggacgcggcggccctcgagcacgacaaggcctacgaccagcagctgcaggcgggtgacaatccgtacctgcggtataaccacgccgacgccgagtttcaggagcgtctgcaagaagatacgtcttttgggggcaacctcgggcgagcagtcttccaggccaagaagcgggttctcgaacctctcggtctggttgaggaaggcgctaagacggctcctggaaagaagagaccggtagagccatcaccccagcgttctccagactcctctacgggcatcggcaagaagggccaacagcccgccagaaaaagactcaattttggtcagactggcgactcagagtcagttccagaccctcaacctctcggagaacctccagcagcgccctctggtgtgggacctaatacaatggctgcaggcggtggcgcaccaatggcagacaataacgaaggcgccgacggagtgggtagttcctcgggaaattggcattgcgattccacatggctgggcgacagagtcatcaccaccagcacccgaacctgggccctgcccacctacaacaaccacctctacaagcaaatctccaacgggacatcgggaggagccaccaacgacaacacctacttcggctacagcaccccctgggggtattttgactttaacagattccactgccacttttcaccacgtgactggcagcgactcatcaacaacaactggggattccggcccaagagactcagcttcaagctcttcaacatccaggtcaaggaggtcacgcagaatgaaggcaccaagaccatcgccaataacctcaccagcaccatccaggtgtttacggactcggagtaccagctgccgtacgttctcggctctgcccaccagggctgcctgcctccgttcccggcggacgtgttcacgattccccagtacggctacctaacactcaacaacggtagtcaggccgtgggacgctcctccttctactgcctggaatactttccttcgcagatgctgagaaccggcaacaacttccagtttacttacaccttcgaggacgtgcctttccacagcagctacgcccacagccagagcttggaccggctgatgaatcctctgattgaccagtacctgtactacttgtctcggattcaaacaacaggaggcacggcaaatacgcagactctgggcttcagccaaggtgggcctaatacaatggccaatcaggcaaagaactggctgccaggaccctgttaccgccaacaacgcgtctcaacgacaaccgggcaaaacaacaatagcaactttgcctggactgctgggaccaaataccatctgaatggaagaaattcattggctaatcctggcatcgctatggcaacacacaaagacgacgaggagcgtttttttcccagtaacgggatcctgatttttggcaaacaaaatgctgccagagacaatgcggattacagcgatgtcatgcccaccagcgaggaagaaatcaaaaccactaaccctgtggccacagaggaatacggtatcgtggcagataacttgcagcagcaaaacacggctcctcaaattggaactgccaacagccagggggccttacccggtatggtctggcagaaccgggacgtgtacctgcagggtcccatctgggccaagattcctcacacggacggcaacttccacccgtctccgctgatgggcggctttggcctgaaacatcctccgcctcagatcctgatcaagaacacgcctgtacctgcggatcctccgaccaccttcaaccagtcaaagctgaactctttcatcacgcaatacagcaccggacaggtcagcgtggaaattgaatgggagctgcagaaggaaaacagcaagcgctggaaccccgagatccagtacacctccaactactacaaatctacaagtgtggactttgctgttaatacagaaggcgtgtactctgaaccccgccccattggcacccgttacctcacccgtaatctgtaa

SEQ ID NO: 12465 - DNA, 2217 bp, Artificial Sequence
  source: /note="Description of Artificial Sequence: Synthetic polynucleotide"
atggctgccgatggttatcttccagattggctcgaggacaacctctctgagggcattcgcgagtggtgggcgctgaaacctggagccccgaagcccaaagccaaccagcaaaagcaggacgacggccggggtctggtgcttcctggctacaagtacctcggacccttcaacggactcgacaagggggagcccgtcaacgcggcggacgcggcggccctcgagcacgacaaggcctacgaccagcagctgcaggcgggtgacaatccgtacctgcggtataaccacgccgacgccgagtttcaggagcgtctgcaagaagatacgtcttttgggggcaacctcgggcgagcagtcttccaggccaagaagcgggttctcgaacctctcggtctggttgaggaaggcgctaagacggctcctggaaagaagagaccggtagagccatcaccccagcgttctccagactcctctacgggcatcggcaagaagggccaacagcccgccagaaaaagactcaattttggtcagactggcgactcagagtcagttccagaccctcaacctctcggagaacctccagcagcgccctctggtgtgggacctaatacaatggctgcaggcggtggcgcaccaatggcagacaataacgaaggcgccgacggagtgggtagttcctcgggaaattggcattgcgattccacatggctgggcgacagagtcatcaccaccagcacccgaacctgggccctgcccacctacaacaaccacctctacaagcaaatctccaacgggacatcgggaggagccaccaacgacaacacctacttcggctacagcaccccctgggggtattttgactttaacagattccactgccacttttcaccacgtgactggcagcgactcatcaacaacaactggggattccggcccaagagactcagcttcaagctcttcaacatccaggtcaaggaggtcacgcagaatgaaggcaccaagaccatcgccaataacctcaccagcaccatccaggtgtttacggactcggagtaccagctgccgtacgttctcggctctgcccaccagggctgcctgcctccgttcccggcggacgtgttcacgattccccagtacggctacctaacactcaacaacggtagtcaggccgtgggacgctcctccttctactgcctggaatactttccttcgcagatgctgagaaccggcaacaacttccagtttacttacaccttcgaggacgtgcctttccacagcagctacgcccacagccagagcttggaccggctgatgaatcctctgattgaccagtacctgtactacttgtctcggattcaaacaacaggaggcacggcaaatacgcagactctgggcttcagccaaggtgggcctaatacaatggccaatcaggcaaagaactggctgccaggaccctgttaccgccaacaacgcgtctcaacgacaaccgggcaaaacaacaatagcaactttgcctggactgctgggaccaaataccatctgaatggaagaaattcattggctaatcctggcatcgctatggcaacacacaaagacgacgaggagcgtttttttcccagtaacgggatcctgatttttggcaaacaaaatgctgccagagacaatgcggattacagcgatgtcatgcccaccagcgaggaagaaatcaaaaccactaaccctgtggccacagaggaatacggtatcgtggcagataacttgcagcagcaaaacacggctcctcaaattggaactgtcaacagccagggggccttacccggtatggtctggcagaaccgggacgtgtacctgcagggtcccatctgggccaagattcctcacacggacggcaacttccacccgtctccgctgatgggcggctttggcctgaaacatcctccgcctcagatcctgatcaagaacacgcctgtacctgcggatcctccgaccaccttcaaccagtcaaagctgaactctttcatcacgcaatacagcaccggacaggtcggcgtggaaattgaatgggagctgcagaaggaaaacagcaagcgctggaaccccgagatccagtacacctccaactactacaaatctacaagtgtggactttgctgttaatacagaaggcgtgtactctgaaccccgccccattggcacccgttacctcacccgtaatctgtaa

SEQ ID NO: 12466 - DNA, 2217 bp, Artificial Sequence
  source: /note="Description of Artificial Sequence: Synthetic polynucleotide"
atggctgccgatggttatcttccagattggctcgaggacaacctctctgagggcattcgcgagtggtgggcgctgaaacctggagccccgaagcccaaagccaaccagcaaaagcaggacgacggccggggtctggtgcttcctggctacaagtacctcggacccttcaacggactcgacaagggggagcccgtcaacgcggcggacgcggcggccctcgagcacggcaaggcctacgaccagcagctgcaggcgggtgacaatccgtacctgcggtataaccacgccgacgccgagtttcaggagcgtctgcaagaagatacgtcttttgggggcaacctcgggcgagcagtcttccaggccaagaagcgggttctcgaacctctcggtctggttgaggaaggcgctaagacggctcctggaaagaagagaccggtagagccatcaccccagcgttctccagactcctctacgggcatcggcaagaagggccaacagcccgccagaaaaagactcaattttggtcagactggcgactcagagtcagttccagaccctcaacctctcggagaacctccagcagcgccctctggtgtgggacctaatacaatggctgcaggcggtggcgcaccaatggcagacaataacgaaggcgccgacggagtgggtagttcctcgggaaattggcattgcgattccacatggctgggcgacagagtcatcaccaccagcacccgaacctgggccctgcccacctacaacaaccacctctacaagcaaatctccaacgggacatcgggaggagccaccaacgacaacacctacttcggctacagcaccccctgggggtattttgactttaacagattccactgccacttttcaccacgtgactggcagcgactcatcaacaacaactggggattccggcccaagagactcagcttcaagctcttcaacatccaggtcaaggaggtcacgcagaatgaaggcaccaagaccatcgccaataacctcaccagcaccatccaggtgtttacggactcggagtaccagctgccgtacgttctcggctctgcccaccagggctgcctgcctccgttcccggcggacgtgttcacgattccccagtacggctacctaacactcaacaacggtagtcaggccgtgggacgctcctccttctactgcctggaatactttccttcgcagatgctgagaaccggcaacaacttccagtttacttacaccttcgaggacgtgcctttccacagcagctacgcccacagccagagcttggaccggctgatgaatcctctgattgaccagtacctgtactacttgtctcggattcaaacaacaggaggcacggcaaatacgcagactctgggcttcagccaaggtgggcctaatacaatggccaatcaggcaaagaactggctgccaggaccctgttaccgccaacaacgcgtctcaacgacaaccgggcaaaacaacaatagcaactttgcctggactgctgggaccaaataccatctgaatggaagaaattcattggctaatcctggcatcgctatggcaacacacaaagacgacgaggagcgtttttttcccagtaacgggatcctgatttttggcaaacaaaatgctgccagagacaatgcggattacagcgatgtcatgcccaccagcgaggaagaaatcaaaaccactaaccctgtggccacagaggaatacggtatcgtggcagataacttgcagcagcaaaacacggctcctcaaattggaactgtcaacagccagggggccttacccggtatggtctggcagaaccgggacgtgtacctgcagggtcccatctgggccaagattcctcacacggacggcaacttccacccgtctccgctgatgggcggctttggcctgaaacatcctccgcctcagatcctgatcaagaacacgcctgtacctgcggatcctccgaccaccttcaaccagtcaaagctgaactctttcatcacgcaatacagcaccggacaggtcagcgtggaaattgaatgggagctgcagaaggaaaacagcaagcgctggaaccccgagatccagtacacctccaactactacaaatctacaagtgtggactttgctgttaatacagaaggcgtgtactctgaaccccgccccattggcacccgttacctcacccgtaatctgtaa

SEQ ID NO: 12467 - DNA, 2217 bp, Artificial Sequence
  source: /note="Description of Artificial Sequence: Synthetic polynucleotide"
atggctgccgatggttatcttccagattggctcgaggacaacctctctgagggcattcgcgagtggtgggcgctgaaacctggagccccgaagcccaaagccaaccagcaaaagcaggacgacggccggggtctggtgcttcctggctacaagtacctcggacccttcaacggactcgacaagggggagcccgtcaacgcggcggacgcggcggccctcgagcacgacaaggcctacgaccagcagctgcaggcgggtgacaatccgtacctgcggtataaccacgccgacgccgagtttcaggagcgtctgcaagaagatacgtcttttgggggcaacctcgggcgagcagtcttccaggccaagaagcgggttctcgaacctctcggtctggttgaggaaggcgctaagacggctcctggaaagaagagaccggtagagccatcaccccagcgttctccagactcctctacgggcatcggcaagaagggccaacagcccgccagaaaaagactcaattttggtcagactggcgactcagagtcagttccagaccctcaacctctcggagaacctccagcagcgccctctggtgtgggacctaatacaatggctgcaggcggtggcgcaccaatggcagacaataacgaaggcgccgacggagtgggtagttcctcgggaaattggcattgcgattccacatggctgggcgacagagtcatcaccaccagcacccgaacctgggccctgcccacctacaacaaccacctctacaagcaaatctccaacgggacatcgggaggagccaccaacgacaacacctacttcggctacagcaccccctgggggtattttgactttaacagattccactgccacttttcaccacgtgactggcagcgactcatcaacaacaactggggattccggcccaagagactcagcttcaagctcttcaacatccaggtcaaggaggtcacgcagaatgaaggcaccaagaccatcgccaataacctcaccagcaccatccaggtgtttacggactcggagtaccagctgccgtacgttctcggctctgcccaccagggctgcctgcctccgttcccggcggacgtgttcacgattccccagtacggctacctaacactcaacaacggtagtcaggccgtgggacgctcctccttctactgcctggaatactttccttcgcagatgctgagaaccggcaacaacttccagtttacttacaccttcgaggacgtgcctttccacagcagctacgcccacagccagagcttggaccggctgatgaatcctctgattgaccagtacctgtactacttgtctcggattcaaacaacaggaggcacggcaaatacgcagactctgggcttcagccaaggtgggcctaatacaatggccaatcaggcaaagaactggctgccaggaccctgttaccgccaacaacgcgtctcaacgacaaccgggcaaaacaacaatagcaactttgcctggactgctgggaccaaataccatctgaatggaagaaattcattggctaatcctggcatcgctatggcaacacacaaagacgacgaggagcgtttttttcccagtaacgggatcctgatttttggcaaacaaaatgctgccagagacaatgcggattacagcgatgtcatgcccaccagcgaggaagaaatcaaaaccactaaccctgtggccacaggggaatacggtatcgtggcagataacttgcagcagcaaaacacggctcctcaaattggaactgtcaacagccagggggccttacccggtatggtctggcagaaccgggacgtgtacctgcagggtcccatctgggccaagattcctcacacggacggcaacttccacccgtctccgctgatgggcggctttggcctgaaacatcctccgcctcagatcctgatcaagaacacgcctgtacctgcggatcctccgaccaccttcaaccagtcaaagctgaactctttcatcacgcaatacagcaccggacaggtcagcgtggaaattgaatgggagctgcagaaggaaaacagcaagcgctggaaccccgagatccagtacacctccaactactacaaatctacaagtgtggactttgctgttaatacagaaggcgtgtactctgaaccccgccccattggcacccgttacctcacccgtaatctgtaa

SEQ ID NO: 12468 - DNA, 2217 bp, Artificial Sequence
  source: /note="Description of Artificial Sequence: Synthetic polynucleotide"
atggctgccgatggttatcttccagattggctcgaggacaacctctctgagggcattcgcgagtggtgggcgctgaaacctggagccccgaagcccaaagccaaccagcaaaagcaggacgacggccggggtctggtgcttcctggctacaagtacctcggacccttcaacggactcgacaagggggagcccgtcaacgcggcggacgcggcggccctcgagcacgacaaggcctacgaccagcagctgcaggcgggtgacaatccgtacctgcggtataaccacgccgacgccgagtttcaggagcgtctgcaagaagatacgtcttttgggggcaacctcgggcgagcagtcttccaggccaagaagcgggttctcgaacctctcggtctggttgaggaaggcgctaagacggctcctggaaagaagagaccggtagagccatcaccccagcgttctccagactcctctacgggcatcggcaagaagggccaacagcccgccagaaaaagactcaattttggtcagactggcgactcagagtcagttccagaccctcaacctctcggagaacctccagcagcgccctctggtgtgggacctaatacaatggctgcaggcggtggcgcaccaatggcagacaataacgaaggcgccgacggagtgggtagttcctcgggaaattggcattgcgattccacatggctgggcgacagagtcatcaccaccagcacccgaacctgggccctgcccacccacaacaaccacctctacaagcaaatctccaacgggacatcgggaggagccaccaacgacaacacctacttcggctacagcaccccctgggggtattttgactttaacagattccactgccacttttcaccacgtgactggcagcgactcatcaacaacaactggggattccggcccaagagactcagcttcaagctcttcaacatccaggtcaaggaggtcacgcagaatgaaggcaccaagaccatcgccaataacctcaccagcaccatccaggtgtttacggactcggagtaccagctgccgtacgttctcggctctgcccaccagggctgcctgcctccgttcccggcggacgtgttcacgattccccagtacggctacctaacactcaacaacggtagtcaggccgtgggacgctcctccttctactgcctggaatactttccttcgcagatgctgagaaccggcaacaacttccagtttacttacaccttcgaggacgtgcctttccacagcagctacgcccacagccagagcttggaccggctgatgaatcctctgattgaccagtacctgtactacttgtctcggattcaaacaacaggaggcacggcaaatacgcagactctgggcttcagccaaggtgggcctaatacaatggccaatcaggcaaagaactggctgccaggaccctgttaccgccaacaacgcgtctcaacgacaaccgggcaaaacaacaatagcaactttgcctggactgctgggaccaaataccatctgaatggaagaaattcattggctaatcctggcatcgctatggcaacacacaaagacgacgaggagcgtttttttcccagtaacgggatcctgatttttggcaaacaaaatgctgccagagacaatgcggattacagcgatgtcatgcccaccagcgaggaagaaatcaaaaccactaaccctgtggccacagaggaatacggtatcgtggcagataacttgcagcagcaaaacacggctcctcaaattggaactgtcaacagccagggggccttacccggtatggtctggcagaaccgggacgtgtacctgcagggtcccatctgggccaagattcctcacacggacggcaacttccacccgtctccgctgatgggcggctttggcctgaaacatcctccgcctcagatcctgatcaagaacacgcctgtacctgcggatcctccgaccaccttcaaccagtcaaagctgaactctttcatcacgcaatacagcaccggacaggtcagcgtggaaattgaatgggagctgcagaaggaaaacagcaagcgctggaaccccgagatccagtacacctccaactactacaaatctacaagtgtggactttgctgttaatacagaaggcgtgtactctgaaccccgccccattggcacccgttacctcacccgtaatctgtaa

SEQ ID NO: 12469 - DNA, 2217 bp, Artificial Sequence
  source: /note="Description of Artificial Sequence: Synthetic polynucleotide"
atggctgccgatggttatcttccagattggctcgaggacaacctctctgagggcattcgcgagtggtgggcgctgaaacctggagccccgaagcccaaagccaaccagcaaaagcaggacgacggccggggtctggtgcttcctggctacaagtacctcggacccttcaacggactcgacaagggggagcccgtcaacgcggcggacgcggcggccctcgagcacgacaaggcctacgaccagcagctgcaggcgggtgacaatccgtacctgcggtataaccacgccgacgccgagtttcaggagcgtctgcaagaagatacgtcttttgggggcaacctcgggcgagcagtcttccaggccaagaagcgggttctcgaacctctcggtctggttgaggaaggcgctaagacggctcctggaaagaagagaccggtagagccatcaccccagcgttctccagactcctctacgggcatcggcaagaagggccaacagcccgccagaaaaagactcaattttggtcagactggcgactcagagtcagttccagaccctcaacctctcggagaacctccagcagcgccctctggtgtgggacctaatacaatggctgcaggcggtggcgcaccaatggcagacaataacgaaggcgccgacggagtgggtagttcctcgggaaattggcattgcgattccacatggctgggcgacagagtcatcaccaccagcacccgaacctgggccctgcccacctacaacaaccacctctacaagcaaatctccaacgggacatcgggaggagccaccaacgacaacacctacttcggctacagcaccccctgggggtattttgactttaacagattccactgccacttttcaccacgtgactggcagcgactcatcaacaacaactggggattccggcccaagagactcagcttcaagctcttcaacatccaggtcaaggaggtcacgcagaatgaaggcaccaagaccatcgccaataacctcaccagcaccatccaggtgtttacggactcggagtaccagctgccgtacgttctcggctctgcccaccagggctgcctgcctccgttcccggcggacgtgttcacgattccccagtacggctacctaacactcaacaacggtagtcaggccgtgggacgctcctccttctactgcctggaatactttccttcgcagatgctgagaaccggcaacaacttccagtttacttacaccttcgaggacgtgcctttccacagcagctacgcccacagccagagcttggaccggctgatgaatcctctgattgaccagtacctgtactacttgtctcggattcaaacaacaggaggcacggcaaatacgcagactctgggcttcagccaaggtgggcctaatacaatggccaatcaggcaaagaactggctgccaggaccctgttaccgccaacaacgcgtctcaacgacaaccgggcaaaacaacaatagcaactttgcctggactgctgggaccaaataccatctgaatggaagaaattcattggctaatcctggcatcgctatggcaacacacaaagacgacgaggagcgtttttttcccagtaacgggatcctgatttttggcaaacaaaatgctgccatagacaatgcggattacagcgatgtcatgcccaccagcgaggaagaaatcaaaaccactaaccctgtggccacagaggaatacggtatcgtggcagataacttgcagcagcaaaacacggctcctcaaattggaactgtcaacagccagggggccttacccggtatggtctggcagaaccgggacgtgtacctgcagggtcccatctgggccaagattcctcacacggacggcaacttccacccgtctccgctgatgggcggctttggcctgaaacatcctccgcctcagatcctgatcaagaacacgcctgtacctgcggatcctccgaccaccttcaaccagtcaaagctgaactctttcatcacgcaatacagcaccggacaggtcagcgtggaaattgaatgggagctgcagaaggaaaacagcaagcgctggaaccccgagatccagtacacctccaactactacaaatctacaagtgtggactttgctgttaatacagaaggcgtgtactctgaaccccgccccattggcacccgttacctcacccgtaatctgtaa

SEQ ID NO: 12470 - DNA, 2217 bp, Artificial Sequence
  source: /note="Description of Artificial Sequence: Synthetic polynucleotide"
atggctgccgatggttatcttccagattggctcgaggacaacctctctgagggcattcgcgagtggtgggcgctgaaacctggagccccgaagcccaaagccaaccagcaaaagcaggacgacggccggggtctggtgcttcctggctacaagtacctcggacccttcaacggactcgacaagggggagcccgtcaacgcggcggacgcggcggccctcgagcacgacaaggcctacgaccagcagctgcaggcgggtgacaatccgtacctgcggtataaccacgccgacgccgagtttcaggagcgtctgcaagaagatacgtcttttgggggcaacctcgggcgagcagtcttccaggccaagaagcgggttctcgaacctctcggtctggttgaggaaggcgctaagacggctcctggaaagaagagaccggtagagccatcaccccagcgttctccagactcctctacgggcatcggcaagaagggccaacagcccgccagaaaaagactcaattttggtcagactggcgactcagagtcagttccagaccctcaacctctcggagaacctccagcagcgccctctggtgtgggacctaatacaatggctgcaggcggtggcgcaccaatggcagacaataacgaaggcgccgacggagtgggtagttcctcgggaaattggcattgcgattccacatggctgggcgacagagtcatcaccaccagcacccgaacctgggccctgcccacctacaacaaccacctctacaagcaaatctccaacgggacatcgggaggagccaccaacgacaacacctacttcggctacagcaccccctgggggtattttgactttaacagattccactgccacttttcaccacgtgactggcagcgactcatcaacaacaactggggattccggcccaagagactcagcttcaagctcttcaacatccaggtcaaggaggtcacgcagaatgaaggcaccaagaccatcgccaataacctcaccagcaccatccaggtgtttacggactcggagtaccagctgccgtacgttctcggctctgcccaccagggctgcctgcctccgttcccggcggacgtgttcacgattccccagtacggctacctaacactcaacaacggtagtcaggccgtgggacgctcctccttctactgcctggaatactttccttcgcagatgctgagaaccggcaacaacttccagtttacttacaccttcgaggacgtgcctttccacagcagctacgcccacagccagagcttggaccggctgatgaatcctctgattgaccagtacctgtactacttgtctcggattcaaacaacaggaggcacggcaaatacgcagactctgggcttcagccaaggtgggcctaatacaatggccaatcaggcaaagaactggctgccaggaccctgttaccgccaacaacgcgtctcaacgacaaccgggcaaaacaacaatagcaactttgcctggactgctgggaccaaataccatctgaatggaagaaattcattggctaatcctggcatcgctatggcaacacacaaagacgacgaggggcgtttttttcccagtaacgggatcctgatttttggcaaacaaaatgctgccagagacaatgcggattacagcgatgtcatgcccaccagcgaggaagaaatcaaaaccactaaccctgtggccacagaggaatacggtatcgtggcagataacttgcagcagcaaaacacggctcctcaaattggaactgtcaacagccagggggccttacccggtatggtctggcagaaccgggacgtgtacctgcagggtcccatctgggccaagattcctcacacggacggcaacttccacccgtctccgctgatgggcggctttggcctgaaacatcctccgcctcagatcctgatcaagaacacgcctgtacctgcggatcctccgaccaccttcaaccagtcaaagctgaactctttcatcacgcaatacagcaccggacaggtcagcgtggaaattgaatgggagctgcagaaggaaaacagcaagcgctggaaccccgagatccagtacacctccaactactacaaatctacaagtgtggactttgctgttaatacagaaggcgtgtactctgaaccccgccccattggcacccgttacctcacccgtaatctgtaa

SEQ ID NO: 12471 - DNA, 2217 bp, Artificial Sequence
  source: /note="Description of Artificial Sequence: Synthetic polynucleotide"
atggctgccgatggttatcttccagattggctcgaggacaacctctctgagggcattcgcgagtggtgggcgctgaaacctggagccccgaagcccaaagccaaccagcaaaagcaggacgacggccggggtctggtgcttcctggctacaagtacctcggacccttcaacggactcgacaagggggagcccgtcaacgcggcggacgcggcggccctcgagcacgacaaggcctacgaccagcagctgcaggcgggtgacaatccgtacctgcggtataaccacgccgacgccgagtttcaggagcgtctgcaagaagatacgtcttttgggggcaacctcgggcgagcagtcttccaggccaagaagcgggttctcgaacctctcggtctggttgaggaaggcgctaagacggctcctggaaagaagagaccggtagagccatcaccccagcgttctccagactcctctacgggcatcggcaagaagggccaacagcccgccagaaaaagactcaattttggtcagactggcgactcagagtcagttccagaccctcaacctctcggagaacctccagcagcgccctctggtgtgggacctaatacaatggctgcaggcggtggcgcaccaatggcagacaataacgaaggcgccgacggagtgggtagttcctcgggaaattggcattgcgattccacatggctgggcgacagagtcatcaccaccagcacccgaacctgggccctgcccacctacaacaaccacctctacaagcaaatctccaacgggacatcgggaggagccaccaacgacaacacctacttcggctacagcaccccctgggggtattttgactttaacagattccactgccacttttcaccacgtgactggcagcgactcatcaacaacaactggggattccggaccaagagactcagcttcaagctcttcaacatccaggtcaaggaggtcacgcagaatgaaggcaccaagaccatcgccaataacctcaccagcaccatccaggtgtttacggactcggagtaccagctgccgtacgttctcggctctgcccaccagggctgcctgcctccgttcccggcggacgtgttcacgattccccagtacggctacctaacactcaacaacggtagtcaggccgtgggacgctcctccttctactgcctggaatactttccttcgcagatgctgagaaccggcaacaacttccagtttacttacaccttcgaggacgtgcctttccacagcagctacgcccacagccagagcttggaccggctgatgaatcctctgattgaccagtacctgtactacttgtctcggattcaaacaacaggaggcacggcaaatacgcagactctgggcttcagccaaggtgggcctaatacaatggccaatcaggcaaagaactggctgccaggaccctgttaccgccaacaacgcgtctcaacgacaaccgggcaaaacaacaatagcaactttgcctggactgctgggaccaaataccatctgaatggaagaaattcattggctaatcctggcatcgctatggcaacacacaaagacgacgaggagcgtttttttcccagtaacgggatcctgatttttggcaaacaaaatgctgccagagacaatgcggattacagcgatgtcatgcccaccagcgaggaagaaatcaaaaccactaaccctgtggccacagaggaatacggtatcgtggcagataacttgcagcagcaaaacacggctcctcaaattggaactgtcaacagccagggggccttacccggtatggtctggcagaaccgggacgtgtacctgcagggtcccatctgggccaagattcctcacacggacggcaacttccacccgtctccgctgatgggcggctttggcctgaaacatcctccgcctcagatcctgatcaagaacacgcctgtacctgcggatcctccgaccaccttcaaccagtcaaagctgaactctttcatcacgcaatacagcaccggacaggtcagcgtggaaattgaatgggagctgcagaaggaaaacagcaagcgctggaaccccgagatccagtacacctccaactactacaaatctacaagtgtggactttgctgttaatacagaaggcgtgtactctgaaccccgccccattggcacccgttacctcacccgtaatctgtaa

SEQ ID NO: 12472 - DNA, 2217 bp, Artificial Sequence
  source: /note="Description of Artificial Sequence: Synthetic polynucleotide"
atggctgccgatggttatcttccagattggctcgaggacaacctctctgagggcattcgcgagtggtgggcgctgaaacctggagccccgaagcccaaagccaaccagcaaaagcaggacgacggccggggtctggtgcttcctggctacaagtacctcggacccttcaacggactcgacaagggggagcccgtcaacgcggcggacgcggcggccctcgagcacgacaaggcctacgaccagcagctgcaggcgggtgacaatccgtacctgcggtataaccacgccgacgccgagtttcaggagcgtctgcaagaagatacgtcttttgggggcaacctcgggcgagcagtcttccaggccaagaagcgggttctcgaacctctcggtctggttgaggaaggcgctaagacggctcctggaaagaagagaccggtagagccatcaccccagcgttctccagactcctctacgggcatcggcaagaagggccaacagcccgccagaaaaagactcaattttggtcagactggcgactcagagtcagttccagaccctcaacctctcggagaacctccagcagcgccctctggtgtgggacctaatacaatggctgcaggcggtggcgcaccaatggcagacaataacgaaggcgccgacggagtgggtagttcctcgggaaattggcattgcgattccacatggctgggcgacagagtcatcaccaccagcacccgaacctgggccctgcccacctacaacaaccacctctacaagcaaatctccaacgggacatcgggaggagccaccaacgacaacacctacttcggctacagcaccccctgggggtattttgactttaacagattccactgccacttttcaccacgtgactggcagcgactcatcaacaacaactggggattccggcccaagagactcagcttcaagctcttcaacatccaggtcaaggaggtcacgcagaatgaaggcaccaagaccatcgccaataacctcaccagcaccatccaggtgtttacggactcggagtaccagctgccgtacgttctcggctctgcccaccagggctgcctgcctccgttcccggcggacgtgttcacgattccccagtacggctacctaacactcaacaacggtagtcaggccgtgggacgctcctccttctactgcctggaatactttccttcgcagatgctgagaaccggcaacaacttccagtttacttacaccttcgaggacgtgcctttccacagcagctacgcccacagccagagcttggaccggctgatgaatcctctgattgaccagtacctgtactacttgtctcggattcaaacaacaggaggcacggcaaatacgcagactctgggcttcagccaaggtgggcctaatacaatggccaatcaggcaaagaactggctgccaggaccctgttaccgccaacaacgcgtctcaacgacaaccgggcaaaacaacaatagcaactttgcctggactgctgggaccaaataccatctgaatggaagaaattcattggctaatcctggcatcgctatggcaacacacaaagacgacgaggagcgtttttttcccagtaacgggatcctgatttttggcaaacaaaatgctgccagagacaatgcggattacagcgatgtcatgcccaccagcgaggaagaaatcaaaaccactaaccctgtggccacagaggaatacggtatcgtggcagataacttgcagcagcaaaacacggctcctcaaattggaactgtcaacagccagggggccttacccggtatggtctggcagaaccgggacgtgtacctgcagggtcccatctgggccaagattcctcacacggacggcaacttccacccgtctccgctgatgggcggctttggcctgaaacatcctccgcctcagatcctgatcaagaacacgcctgtacctgcggatcctccgaccaccttcaaccagtcaaagctgaactctttcatcacgcaatgcagcaccggacaggtcagcgtggaaattgaatgggagctgcagaaggaaaacagcaagcgctggaaccccgagatccagtacacctccaactactacaaatctacaagtgtggactttgctgttaatacagaaggcgtgtactctgaaccccgccccattggcacccgttacctcacccgtaatctgtaa

SEQ ID NO: 12473 - DNA, 2217 bp, Artificial Sequence
  source: /note="Description of Artificial Sequence: Synthetic polynucleotide"
atggctgccgatggttatcttccagattggctcgaggacaacctctctgagggcattcgcgagtggtgggcgctgaaacctggagccccgaagcccaaagccaaccagcaaaagcaggacgacggccggggtctggtgcttcctggctacaagtacctcggacccttcaacggactcgacaagggggagcccgtcaacgcggcggacgcggcggccctcgagcacgacaaggcctacgaccagcagctgcaggcgggtgacaatccgtacctgcggtataaccacgccgacgccgagtttcaggagcgtctgcaagaagatacgtcttttgggggcaacctcgggcgagcagtcttccaggccaagaagcgggttctcgaacctctcggtctggttgaggaaggcgctaagacggctcctggaaagaagagaccggtagagccatcaccccagcgttctccagactcctctacgggcatcggcaagaagggccaacagcccgccagaaaaagactcaattttggtcagactggcgactcagagtcagttccagaccctcaacctctcggagaacctccagcagcgccctctggtgtgggacctaatacaatggctgcaggcggtggcgcaccaatggcagacaataacgaaggcgccgacggagtgggtagttcctcgggaaattggcattgcgattccacatggctgggcgacagagtcatcaccaccagcacccgaacctgggccctgcccacctacaacaaccacctctacaagcaaatctccaacgggacatcgggaggagccaccaacgacaacacctacttcggctacagcaccccctgggggtattttgactttaacagattccactgccacttttcaccacgtgactggcagcgactcatcaacaacaactggggattccggcccaagagactcagcttcaagctcttcaacatccaggtcaaggaggtcacgcagaatgaaggcaccaagaccatcgccaataacctcaccagcaccatccaggtgtttacggactcggagtaccagctgccgtacgttctcggctctgcccaccagggctgcctgcctccgttcccggcggacgtgttcacgattccccagtacggctacctaacactcaacaacggtagtcaggccgtgggacgctcctccttctactgcctggaatactttccttcgcagatgctgagaaccggcaacaacttccagtttacttacaccttcgaggacgtgcctttccgcagcagctacgcccacagccagagcttggaccggctgatgaatcctctgattgaccagtacctgtactacttgtctcggattcaaacaacaggaggcacggcaaatacgcagactctgggcttcagccaaggtgggcctaatacaatggccaatcaggcaaagaactggctgccaggaccctgttaccgccaacaacgcgtctcaacgacaaccgggcaaaacaacaatagcaactttgcctggactgctgggaccaaataccatctgaatggaagaaattcattggctaatcctggcatcgctatggcaacacacaaagacgacgaggagcgtttttttcccagtaacgggatcctgatttttggcaaacaaaatgctgccagagacaatgcggattacagcgatgtcatgcccaccagcgaggaagaaatcaaaaccactaaccctgtggccacagaggaatacggtatcgtggcagataacttgcagcagcaaaacacggctcctcaaattggaactgtcaacagccagggggccttacccggtatggtctggcagaaccgggacgtgtacctgcagggtcccatctgggccaagattcctcacacggacggcaacttccacccgtctccgctgatgggcggctttggcctgaaacatcctccgcctcagatcctgatcaagaacacgcctgtacctgcggatcctccgaccaccttcaaccagtcaaagctgaactctttcatcacgcaatacagcaccggacaggtcagcgtggaaattgaatgggagctgcagaaggaaaacagcaagcgctggaaccccgagatccagtacacctccaactactacaaatctacaagtgtggactttgctgttaatacagaaggcgtgtactctgaaccccgccccattggcacccgttacctcacccgtaatctgtaa

SEQ ID NO: 12474 - DNA, 2217 bp, Artificial Sequence
  source: /note="Description of Artificial Sequence: Synthetic polynucleotide"
atggctgccgatggttatcttccagattggctcgaggacaacctctctgagggcattcgcgagtggtgggcgctgaaacctggagccccgaagcccaaagccaaccagcaaaagcaggacgacggccggggtctggtgcttcctggctacaagcacctcggacccttcaacggactcgacaagggggagcccgtcaacgcggcggacgcggcggccctcgagcacgacaaggcctacgaccagcagctgcaggcgggtgacaatccgtacctgcggtataaccacgccgacgccgagtttcaggagcgtctgcaagaagatacgtcttttgggggcaacctcgggcgagcagtcttccaggccaagaagcgggttctcgaacctctcggtctggttgaggaaggcgctaagacggctcctggaaagaagagaccggtagagccatcaccccagcgttctccagactcctctacgggcatcggcaagaagggccaacagcccgccagaaaaagactcaattttggtcagactggcgactcagagtcagttccagaccctcaacctctcggagaacctccagcagcgccctctggtgtgggacctaatacaatggctgcaggcggtggcgcaccaatggcagacaataacgaaggcgccgacggagtgggtagttcctcgggaaattggcattgcgattccacatggctgggcgacagagtcatcaccaccagcacccgaacctgggccctgcccacctacaacaaccacctctacaagcaaatctccaacgggacatcgggaggagccaccaacgacaacacctacttcggctacagcaccccctgggggtattttgactttaacagattccactgccacttttcaccacgtgactggcagcgactcatcaacaacaactggggattccggcccaagagactcagcttcaagctcttcaacatccaggtcaaggaggtcacgcagaatgaaggcaccaagaccatcgccaataacctcaccagcaccatccaggtgtttacggactcggagtaccagctgccgtacgttctcggctctgcccaccagggctgcctgcctccgttcccggcggacgtgttcacgattccccagtacggctacctaacactcaacaacggtagtcaggccgtgggacgctcctccttctactgcctggaatactttccttcgcagatgctgagaaccggcaacaacttccagtttacttacaccttcgaggacgtgcctttccacagcagctacgcccacagccagagcttggaccggctgatgaatcctctgattgaccagtacctgtactacttgtctcggattcaaacaacaggaggcacggcaaatacgcagactctgggcttcagccaaggtgggcctaatacaatggccaatcaggcaaagaactggctgccaggaccctgttaccgccaacaacgcgtctcaacgacaaccgggcaaaacaacaatagcaactttgcctggactgctgggaccaaataccatctgaatggaagaaattcattggctaatcctggcatcgctatggcaacacacaaagacgacgaggagcgtttttttcccagtaacgggatcctgatttttggcaaacaaaatgctgccagagacaatgcggattacagcgatgtcatgcccaccagcgaggaagaaatcaaaaccactaaccctgtggccacagaggaatacggtatcgtggcagataacttgcagcagcaaaacacggctcctcaaattggaactgtcaacagccagggggccttacccggtatggtctggcagaaccgggacgtgtacctgcagggtcccatctgggccaagattcctcacacggacggcaacttccacccgtctccgctgatgggcggctttggcctgaaacatcctccgcctcagatcctgatcaagaacacgcctgtacctgcggatcctccgaccaccttcaaccagtcaaagctgaactctttcatcacgcaatacagcaccggacaggtcagcgtggaaattgaatgggagctgcagaaggaaaacagcaagcgctggaaccccgagatccagtacacctccaactactacaaatctacaagtgtggactttgctgttaatacagaaggcgtgtactctgaaccccgccccattggcacccgttacctcacccgtaatctgtaa

SEQ ID NO: 12475 - DNA, 2217 bp, Artificial Sequence
  source: /note="Description of Artificial Sequence: Synthetic polynucleotide"
atggctgccgatggttatcttccagattggctcgaggacaacctctctgagggcattcgcgagtggtgggcgctgaaacctggagccccgaagcccaaagccaaccagcaaaagcaggacgacggccggggtctggtgcttcctggctacaagtacctcggacccttcaacggactcgacaagggggagcccgtcaacgcggcggacgcggcggccctcgagcacgacaaggcctacgaccagcagctgcaggcgggtgacaatccgtacctgcggtataaccacgccgacgccgagtttcaggagcgtctgcaagaagatacgtcttttgggggcaacctcgggcgagcagtcttccaggccaagaagcgggttctcgaacctctcggtctggttgaggaaggcgctaagacggctcctggaaagaagagaccggtagagccatcaccccagcgttctccagactcctctacgggcatcggcaagaagggccaacagcccgccagaaaaagactcaattttggtcagactggcgactcagagtcagttccagaccctcaacctctcggagaacctccagcagcgccctctggtgtgggacctaatacaatggctgcaggcggtggcgcaccaatggcagacaataacgaaggcgccgacggagtgggtagttcctcgggaaattggcattgcgattccacatggctgggcgacagagtcatcaccaccagcacccgaacctgggccctgcccacctacaacaaccacctctacaagcaaatctccaacgggacatcgggaggagccaccaacgacaacacctacttcggctacagcaccccctgggggtattttgactttaacagattccactgccacttttcaccacgtgactggcagcgactcatcaacaacaactggggattccggcccaagagactcagcttcaagctcttcaacatccaggtcaaggaggtcacgcagaatgaaggcaccaagaccatcgccaataacctcaccagcaccatccaggtgtttacggactcggagtaccagctgccgtacgttctcggctctgcccaccagggctgcctgcctccgttcccggcggacgtgttcacgattccccagtacggctacctaacactcaacaacggtagtcaggccgtgggacgctcctccttctactgcctggaatactttccttcgcagatgctgagaaccggcaacaacttccagtttacttacaccttcgaggacgtgcctttccacagcagctacgcccacagccagagcttggaccggctgatgaatcctctgattgaccagtacctgtactacttgtctcggattcaaacaacaggaggcacggcaaatacgcagactctgggcttcagccaaggtgggcctaatacaatggccaatcaggcaaagaactggctgccaggaccctgttaccgccaacaacgcgtctcagcgacaaccgggcaaaacaacaatagcaactttgcctggactgctgggaccaaataccatctgaatggaagaaattcattggctaatcctggcatcgctatggcaacacacaaagacgacgaggagcgtttttttcccagtaacgggatcctgatttttggcaaacaaaatgctgccagagacaatgcggattacagcgatgtcatgcccaccagcgaggaagaaatcaaaaccactaaccctgtggccacagaggaatacggtatcgtggcagataacttgcagcagcaaaacacggctcctcaaattggaactgtcaacagccagggggccttacccggtatggtctggcagaaccgggacgtgtacctgcagggtcccatctgggccaagattcctcacacggacggcaacttccacccgtctccgctgatgggcggctttggcctgaaacatcctccgcctcagatcctgatcaagaacacgcctgtacctgcggatcctccgaccaccttcaaccagtcaaagctgaactctttcatcacgcaatacagcaccggacaggtcagcgtggaaattgaatgggagctgcagaaggaaaacagcaagcgctggaaccccgagatccagtacacctccaactactacaaatctacaagtgtggactttgctgttaatacagaaggcgtgtactctgaaccccgccccattggcacccgttacctcacccgtaatctgtaa

SEQ ID NO: 12476 - DNA, 2217 bp, Artificial Sequence
  source: /note="Description of Artificial Sequence: Synthetic polynucleotide"
atggctgccgatggttatcttccagattggctcgaggacaacctctctgagggcattcgcgagtggtgggcgctgaaacctggagccccgaagcccaaagccaaccagcaaaagcaggacgacggccggggtctggtgcttcctggctacaagtacctcggacccttcaacggactcgacaagggggagcccgtcaacgcggcggacgcggcggccctcgagcacgacaaggcctacgaccagcagctgcaggcgggtgacaatccgtacctgcggtataaccacgccgacgccgagtttcaggagcgtctgcaagaagatacgtcttttgggggcaacctcgggcgagcagtcttccaggccaagaagcgggttctcgaacctctcggtctggttgaggaaggcgctaagacggctcctggaaagaagagaccggtagagccatcaccccagcgttctccagactcctctacgggcatcggcaagaagggccaacagcccgccagaaaaagactcaattttggtcagactggcggctcagagtcagttccagaccctcaacctctcggagaacctccagcagcgccctctggtgtgggacctaatacaatggctgcaggcggtggcgcaccaatggcagacaataacgaaggcgccgacggagtgggtagttcctcgggaaattggcattgcgattccacatggctgggcgacagagtcatcaccaccagcacccgaacctgggccctgcccacctacaacaaccacctctacaagcaaatctccaacgggacatcgggaggagccaccaacgacaacacctacttcggctacagcaccccctgggggtattttgactttaacagattccactgccacttttcaccacgtgactggcagcgactcatcaacaacaactggggattccggcccaagagactcagcttcaagctcttcaacatccaggtcaaggaggtcacgcagaatgaaggcaccaagaccatcgccaataacctcaccagcaccatccaggtgtttacggactcggagtaccagctgccgtacgttctcggctctgcccaccagggctgcctgcctccgttcccggcggacgtgttcacgattccccagtacggctacctaacactcaacaacggtagtcaggccgtgggacgctcctccttctactgcctggaatactttccttcgcagatgctgagaaccggcaacaacttccagtttacttacaccttcgaggacgtgcctttccacagcagctacgcccacagccagagcttggaccggctgatgaatcctctgattgaccagtacctgtactacttgtctcggattcaaacaacaggaggcacggcaaatacgcagactctgggcttcagccaaggtgggcctaatacaatggccaatcaggcaaagaactggctgccaggaccctgttaccgccaacaacgcgtctcaacgacaaccgggcaaaacaacaatagcaactttgcctggactgctgggaccaaataccatctgaatggaagaaattcattggctaatcctggcatcgctatggcaacacacaaagacgacgaggagcgtttttttcccagtaacgggatcctgatttttggcaaacaaaatgctgccagagacaatgcggattacagcgatgtcatgcccaccagcgaggaagaaatcaaaaccactaaccctgtggccacagaggaatacggtatcgtggcagataacttgcagcagcaaaacacggctcctcaaattggaactgtcaacagccagggggccttacccggtatggtctggcagaaccgggacgtgtacctgcagggtcccatctgggccaagattcctcacacggacggcaacttccacccgtctccgctgatgggcggctttggcctgaaacatcctccgcctcagatcctgatcaagaacacgcctgtacctgcggatcctccgaccaccttcaaccagtcaaagctgaactctttcatcacgcaatacagcaccggacaggtcagcgtggaaattgaatgggagctgcagaaggaaaacagcaagcgctggaaccccgagatccagtacacctccaactactacaaatctacaagtgtggactttgctgttaatacagaaggcgtgtactctgaaccccgccccattggcacccgttacctcacccgtaatctgtaa

SEQ ID NO: 12477 - DNA, 2217 bp, Artificial Sequence
  source: /note="Description of Artificial Sequence: Synthetic polynucleotide"
atggctgccgatggttatcttccagattggctcgaggacaacctctctgagggcattcgcgagtggtgggcgctgaaacctggagccccgaagcccaaagccaaccagcaaaagcaggacgacggccggggtctggtgcttcctggctacaagtacctcggacccttcaacggactcgacaagggggagcccgtcaacgcggcggacgcggcggccctcgagcacgacaaggcctacgaccagcagctgcaggcgggtgacaatccgtacctgcggtataaccacgccgacgccgagtttcaggagcgtctgcaagaagatacgtcttttgggggcaacctcgggcgagcagtcttccaggccaagaagcgggttctcgaacctctcggtctggttgaggaaggcgctaagacggctcctggaaagaagagaccggtagagccatcaccccagcgttctccagactcctctacgggcatcggcaagaagggccaacagcccgccagaaaaagactcaattttggtcagactggcgactcagagtcagttccagaccctcaacctctcggagaacctccagcagcgccctctggtgtgggacctaatacaatggctgcaggcggtggcgcaccaatggcagacaataacgaaggcgccgacggagtgggtagttcctcgggaaattggcattgcgattccgcatggctgggcgacagagtcatcaccaccagcacccgaacctgggccctgcccacctacaacaaccacctctacaagcaaatctccaacgggacatcgggaggagccaccaacgacaacacctacttcggctacagcaccccctgggggtattttgactttaacagattccactgccacttttcaccacgtgactggcagcgactcatcaacaacaactggggattccggcccaagagactcagcttcaagctcttcaacatccaggtcaaggaggtcacgcagaatgaaggcaccaagaccatcgccaataacctcaccagcaccatccaggtgtttacggactcggagtaccagctgccgtacgttctcggctctgcccaccagggctgcctgcctccgttcccggcggacgtgttcacgattccccagtacggctacctaacactcaacaacggtagtcaggccgtgggacgctcctccttctactgcctggaatactttccttcgcagatgctgagaaccggcaacaacttccagtttacttacaccttcgaggacgtgcctttccacagcagctacgcccacagccagagcttggaccggctgatgaatcctctgattgaccagtacctgtactacttgtctcggattcaaacaacaggaggcacggcaaatacgcagactctgggcttcagccaaggtgggcctaatacaatggccaatcaggcaaagaactggctgccaggaccctgttaccgccaacaacgcgtctcaacgacaaccgggcaaaacaacaatagcaactttgcctggactgctgggaccaaataccatctgaatggaagaaattcattggctaatcctggcatcgctatggcaacacacaaagacgacgaggagcgtttttttcccagtaacgggatcctgatttttggcaaacaaaatgctgccagagacaatgcggattacagcgatgtcatgcccaccagcgaggaagaaatcaaaaccactaaccctgtggccacagaggaatacggtatcgtggcagataacttgcagcagcaaaacacggctcctcaaattggaactgtcaacagccagggggccttacccggtatggtctggcagaaccgggacgtgtacctgcagggtcccatctgggccaagattcctcacacggacggcaacttccacccgtctccgctgatgggcggctttggcctgaaacatcctccgcctcagatcctgatcaagaacacgcctgtacctgcggatcctccgaccaccttcaaccagtcaaagctgaactctttcatcacgcaatacagcaccggacaggtcagcgtggaaattgaatgggagctgcagaaggaaaacagcaagcgctggaaccccgagatccagtacacctccaactactacaaatctacaagtgtggactttgctgttaatacagaaggcgtgtactctgaaccccgccccattggcacccgttacctcacccgtaatctgtaa

SEQ ID NO: 12478 - DNA, 2217 bp, Artificial Sequence
  source: /note="Description of Artificial Sequence: Synthetic polynucleotide"
atggctgccgatggttatcttccagattggctcgaggacaacctctctgagggcattcgcgagtggtgggcgctgaaacctggagccccgaagcccaaagccaaccagcaaaagcaggacgacggccggggtctggtgcttcctggctacaagtacctcggacccttcaacggactcgacaagggggagcccgtcaacgcggcggacgcggcggccctcgagcacgacaaggcctacgaccagcagctgcaggcgggtgacaatccgtacctgcggtataaccacgccgacgccgagtttcaggagcgtctgcaagaagatacgtcttttgggggcaacctcgggcgagcagtcttccaggccaagaagcgggttctcgaacctctcggtctggttgaggaaggcgctaagacggctcctggaaagaagagaccggtagagccatcaccccagcgttctccagactcctctacgggcatcggcaagaagggccaacagcccgccagaaaaagactcaattttggtcagactggcgactcagagtcagttccagaccctcaacctctcggagaacctccagcagcgccctctggtgtgggacctaatacaatggctgcaggcggtggcgcaccaatggcagacaataacgaaggcgccgacggagtgggtagttcctcgggaaattggcattgcgattccacatggctgggcgacagagtcatcaccaccagcacccgaacctgggccctgcccacctacaacaaccacctctacaagcaaatctccaacgggacatcgggaggagccaccaacgacaacacctacttcggctacagcaccccctgggggtattttgactttaacagattccactgccacttttcaccacgtgactggcagcgactcatcaacaacaactggggattccggcccaagagactcagcttcaagctcttcaacatccaggtcaaggaggtcacgcagaatgaaggcaccaagaccatcgccaataacctcaccagcaccatccaggtgtttacggactcggagtaccagctgccgtacgttctcggctctgcccaccggggctgcctgcctccgttcccggcggacgtgttcacgattccccagtacggctacctaacactcaacaacggtagtcaggccgtgggacgctcctccttctactgcctggaatactttccttcgcagatgctgagaaccggcaacaacttccagtttacttacaccttcgaggacgtgcctttccacagcagctacgcccacagccagagcttggaccggctgatgaatcctctgattgaccagtacctgtactacttgtctcggattcaaacaacaggaggcacggcaaatacgcagactctgggcttcagccaaggtgggcctaatacaatggccaatcaggcaaagaactggctgccaggaccctgttaccgccaacaacgcgtctcaacgacaaccgggcaaaacaacaatagcaactttgcctggactgctgggaccaaataccatctgaatggaagaaattcattggctaatcctggcatcgctatggcaacacacaaagacgacgaggagcgtttttttcccagtaacgggatcctgatttttggcaaacaaaatgctgccagagacaatgcggattacagcgatgtcatgcccaccagcgaggaagaaatcaaaaccactaaccctgtggccacagaggaatacggtatcgtggcagataacttgcagcagcaaaacacggctcctcaaattggaactgtcaacagccagggggccttacccggtatggtctggcagaaccgggacgtgtacctgcagggtcccatctgggccaagattcctcacacggacggcaacttccacccgtctccgctgatgggcggctttggcctgaaacatcctccgcctcagatcctgatcaagaacacgcctgtacctgcggatcctccgaccaccttcaaccagtcaaagctgaactctttcatcacgcaatacagcaccggacaggtcagcgtggaaattgaatgggagctgcagaaggaaaacagcaagcgctggaaccccgagatccagtacacctccaactactacaaatctacaagtgtggactttgctgttaatacagaaggcgtgtactctgaaccccgccccattggcacccgttacctcacccgtaatctgtaa

SEQ ID NO: 12479 - DNA, 2217 bp, Artificial Sequence
  source: /note="Description of Artificial Sequence: Synthetic polynucleotide"
atggctgccgatggttatcttccagattggctcgaggacaacctctctgagggcattcgcgagtggtgggcgctgaaacctggagccccgaagcccaaagccaaccagcaaaagcaggacgacggccggggtctggtgcttcctggctacaagtacctcggacccttcaacggactcgacaagggggagcccgtcaacgcggcggacgcggcggccctcgagcacgacaaggcctacgaccagcagctgcaggcgggtgacaatccgtacctgcggtataaccacgccgacgccgagtttcaggagcgtctgcaagaagatacgtcttttgggggcaacctcgggcgagcagtcttccaggccaagaagcgggttctcgaacctctcggtctggttgaggaaggcgctaagacggctcctggaaagaagagaccggtagagccatcaccccagcgttctccagactcctctacgggcatcggcaagaagggccaacagcccgccagaaaaagactcaattttggtcagactggcgactcagagtcagttccagaccctcaacctctcggagaacctccagcagcgccctctggtgtgggacctaatacaatggctgcaggcggtggcgcaccaatggcagacaataacgaaggcgccgacggagtgggtagttcctcgggaaattggcattgcgattccacatggctgggcgacagagtcatcaccaccagcacccgaacctgggccctgcccacctacaacaaccacctctacaagcaaatctccaacgggacatcgggaggagccaccaacgacaacacctacttcggctacagcaccccctgggggtattttgactttaacagattccactgccacttttcaccacgtgactggcagcgactcatcaacaacaactggggattccggcccaagagactcagcttcaagctcttcaacatccaggtcaaggaggtcacgcagaatgaaggcaccaagaccatcgccaataacctcaccagcaccatccaggtgtttacggactcggagtaccagctgccgtacgttctcggctctgcccaccagggctgcctgcctccgttcccggcggacgtgttcacgattccccagtacggctacctaacactcaacaacggtagtcaggccgtgggacgctcctccttctactgcctggaatactttccttcgcagatgctgagaaccggcaacaacttccagtttacttacaccttcgaggacgtgcctttccacagcagctacgcccacagccagagcttggaccggctgatgaatcctctgattgaccagtacctgtactacttgtctcggattcaaacaacaggaggcacggcaaatacgcagactctgggcttcagccaaggtgggcctaatacaatggccaatcaggcaaagaactggctgccaggaccctgttaccgccaacaacgcgtctcaacgacaaccgggcaaaacaacaatagcaactttgcctggactgctgggaccaaataccatctgaatggaagaaattcattggctaatcctggcatcgctatggcaacacacaaagacgacgaggagcgtttttttcccagtaacgggatcctgatttttggcaaacaaaatgctgccagagacaatgcggattacagcgatgtcatgcccaccagcgaggaagaaatcaaaaccactaaccctgtggccacagaggaatacggtatcgtggcagataacttgcagcagcaaaacacggctcctcaaattggaactgtcaacagccagggggccttacccggtatggtctggcagaaccgggacgtgtacctgcagggtcccatctgggccaagattcctcacacggacggcaacttccacccgtctccgctgatgggcggctttggcctgaaacatcctccgcctcagatcctgatcaagaacacgcctgtatctgcggatcctccgaccaccttcaaccagtcaaagctgaactctttcatcacgcaatacagcaccggacaggtcagcgtggaaattgaatgggagctgcagaaggaaaacagcaagcgctggaaccccgagatccagtacacctccaactactacaaatctacaagtgtggactttgctgttaatacagaaggcgtgtactctgaaccccgccccattggcacccgttacctcacccgtaatctgtaa

SEQ ID NO: 12480 - DNA, 2217 bp, Artificial Sequence
  source: /note="Description of Artificial Sequence: Synthetic polynucleotide"
atggctgccgatggttatcttccagattggctcgaggacaacctctctgagggcattcgcgagtggtgggcgctgaaacctggagccccgaagcccaaagccaaccagcaaaagcaggacgacggccggggtctggtgcttcctggctacaggtacctcggacccttcaacggactcgacaagggggagcccgtcaacgcggcggacgcggcggccctcgagcacgacaaggcctacgaccagcagctgcaggcgggtgacaatccgtacctgcggtataaccacgccgacgccgagtttcaggagcgtctgcaagaagatacgtcttttgggggcaacctcgggcgagcagtcttccaggccaagaagcgggttctcgaacctctcggtctggttgaggaaggcgctaagacggctcctggaaagaagagaccggtagagccatcaccccagcgttctccagactcctctacgggcatcggcaagaagggccaacagcccgccagaaaaagactcaattttggtcagactggcgactcagagtcagttccagaccctcaacctctcggagaacctccagcagcgccctctggtgtgggacctaatacaatggctgcaggcggtggcgcaccaatggcagacaataacgaaggcgccgacggagtgggtagttcctcgggaaattggcattgcgattccacatggctgggcgacagagtcatcaccaccagcacccgaacctgggccctgcccacctacaacaaccacctctacaagcaaatctccaacgggacatcgggaggagccaccaacgacaacacctacttcggctacagcaccccctgggggtattttgactttaacagattccactgccacttttcaccacgtgactggcagcgactcatcaacaacaactggggattccggcccaagagactcagcttcaagctcttcaacatccaggtcaaggaggtcacgcagaatgaaggcaccaagaccatcgccaataacctcaccagcaccatccaggtgtttacggactcggagtaccagctgccgtacgttctcggctctgcccaccagggctgcctgcctccgttcccggcggacgtgttcacgattccccagtacggctacctaacactcaacaacggtagtcaggccgtgggacgctcctccttctactgcctggaatactttccttcgcagatgctgagaaccggcaacaacttccagtttacttacaccttcgaggacgtgcctttccacagcagctacgcccacagccagagcttggaccggctgatgaatcctctgattgaccagtacctgtactacttgtctcggattcaaacaacaggaggcacggcaaatacgcagactctgggcttcagccaaggtgggcctaatacaatggccaatcaggcaaagaactggctgccaggaccctgttaccgccaacaacgcgtctcaacgacaaccgggcaaaacaacaatagcaactttgcctggactgctgggaccaaataccatctgaatggaagaaattcattggctaatcctggcatcgctatggcaacacacaaagacgacgaggagcgtttttttcccagtaacgggatcctgatttttggcaaacaaaatgctgccagagacaatgcggattacagcgatgtcatgcccaccagcgaggaagaaatcaaaaccactaaccctgtggccacagaggaatacggtatcgtggcagataacttgcagcagcaaaacacggctcctcaaattggaactgtcaacagccagggggccttacccggtatggtctggcagaaccgggacgtgtacctgcagggtcccatctgggccaagattcctcacacggacggcaacttccacccgtctccgctgatgggcggctttggcctgaaacatcctccgcctcagatcctgatcaagaacacgcctgtacctgcggatcctccgaccaccttcaaccagtcaaagctgaactctttcatcacgcaatacagcactggacaggtcagcgtggaaattgaatgggagctgcagaaggaaaacagcaagcgctggaaccccgagatccagtacacctccaactactacaaatctacaagtgtggactttgctgttaatacagaaggcgtgtactctgaaccccgccccattggcacccgttacctcacccgtaatctgtaa

SEQ ID NO: 12481 - DNA, 2217 bp, Artificial Sequence
  source: /note="Description of Artificial Sequence: Synthetic polynucleotide"
atggctgccgatggttatcttccagattggctcgaggacaacctctctgagggcattcgcgagtggtgggcgctgaaacctggagccccgaagcccaaagccaaccagcaaaagcaggacgacggccggggtctggtgcttcctggctacaagtacctcggacccttcaacggactcgacaagggggagcccgtcaacgcggcggacgcggcggccctcgagcacgacaaggcctacgaccagcagctgcaggcgggtgacaatccgtacctgcggtataaccacgccgacgccgagtttcaggagcgtctgcaagaagatacgtcttttgggggcaacctcgggcgagcagtcttccaggccaagaagcgggttctcgaacctctcggtctggttgaggaaggcgctaagacggctcctggaaagaagagaccggtagagccatcaccccagcgttctccagactcctctacgggcatcggcaagaagggccaacagcccgccagaaaaagactcaattttggtcagactggcgactcagagtcagttccagaccctcaacctctcggagaacctccagcagcgccctctggtgtgggacctaatacaatggctgcaggcggtggcgcaccaatggcagacaataacgaaggcgccgacggagtgggtagttcctcgggaaattggcattgcgattccacatggctgggcgacagagtcatcaccaccagcacccgaacctgggccctgcccacctacaacaaccacctctacaagcaaatctccaacgggacatcgggaggagccaccaacgacaacacctacttcggctacagcaccccctgggggtattttgactttaacagattccactgccacttttcaccacgtgactggcagcgactcatcaacaacaactggggattccggcccaagagactcagcttcaagctcttcaacatccaggtcaaggaggtcacgcagaatgaaggcaccaagaccatcgccaataacctcaccagcaccatccaggtgtttacggactcggagtaccagctgccgtacgttctcggctctgcccaccagggctgcctgcctccgttcccggcggacgtgttcacgattccccagtacggctacctaacactcaacaacggtagtcaggccgtgggacgctcctccttctactgcctggaatactttccttcgcagatgctgagaaccggcaacaacttccagtttacttacaccttcgaggacgtgcctttccacagcagctacgcccacagccagagcttggaccggctgatgaatcctctgattgaccagtacctgtactacttgtctcggattcaaacaacaggaggcacggcaaatacgcagactctgggcttcagccaaggtgggcctaatacaatggccaatcaggcaaagaactggctgccaggaccctgttaccgccaacaacgcgtctcaacgacaaccgggcaaaacaacaatagcaactttgcctggactgctgggaccaaataccgtctgaatggaagaaattcattggctaatcctggcatcgctatggcaacacacaaagacgacgaggagcgtttttttcccagtaacgggatcctgatttttggcaaacaaaatgctgccagagacaatgcggattacagcgatgtcatgcccaccagcgaggaagaaatcaaaaccactaaccctgtggccacagaggaatacggtatcgtggcagataacttgcagcagcaaaacacggctcctcaaattggaactgtcaacagccagggggccttacccggtatggtctggcagaaccgggacgtgtacctgcagggtcccatctgggccaagattcctcacacggacggcaacttccacccgtctccgctgatgggcggctttggcctgaaacatcctccgcctcagatcctgatcaagaacacgcctgtacctgcggatcctccgaccaccttcaaccagtcaaagctgaactctttcatcacgcaatacagcaccggacaggtcagcgtggaaattgaatgggagctgcagaaggaaaacagcaagcgctggaaccccgagatccagtacacctccaactactacaaatctacaagtgtggactttgctgttaatacagaaggcgtgtactctgaaccccgccccattggcacccgttacctcacccgtaatctgtaa

SEQ ID NO: 12482 - DNA, 2217 bp, Artificial Sequence
  source: /note="Description of Artificial Sequence: Synthetic polynucleotide"
atggctgccgatggttatcttccagattggctcgaggacaacctctctgagggcattcgcgagtggtgggcgctgaaacctggagccccgaagcccaaagccaaccagcaaaagcaggacgacggccggggtctggtgcttcctggctacaagtacctcggacccttcaacggactcgacaagggggagcccgtcaacgcggcggacgcggcggccctcgagcacgacaaggcctacgaccagcagctgcaggcgggtgacaatccgtacctgcggtataaccacgccgacgccgagtttcaggagcgtctgcaagaagatacgtcttttgggggcaacctcgggcgagcagtcttccaggccaagaagcgggttctcgaacctctcggtctggttgaggaaggcgctaagacggctcctggaaagaagagaccggtagagccatcaccccagcgttctccagactcctctacgggcatcggcaagaagggccaacagcccgccagaaaaagactcaattttggtcagactggcgactcagagtcagctccagaccctcaacctctcggagaacctccagcagcgccctctggtgtgggacctaatacaatggctgcaggcggtggcgcaccaatggcagacaataacgaaggcgccgacggagtgggtagttcctcgggaaattggcattgcgattccacatggctgggcgacagagtcatcaccaccagcacccgaacctgggccctgcccacctacaacaaccacctctacaagcaaatctccaacgggacatcgggaggagccaccaacgacaacacctacttcggctacagcaccccctgggggtattttgactttaacagattccactgccacttttcaccacgtgactggcagcgactcatcaacaacaactggggattccggcccaagagactcagcttcaagctcttcaacatccaggtcaaggaggtcacgcagaatgaaggcaccaagaccatcgccaataacctcaccagcaccatccaggtgtttacggactcggagtaccagctgccgtacgttctcggctctgcccaccagggctgcctgcctccgttcccggcggacgtgttcacgattccccagtacggctacctaacactcaacaacggtagtcaggccgtgggacgctcctccttctactgcctggaatactttccttcgcagatgctgagaaccggcaacaacttccagtttacttacaccttcgaggacgtgcctttccacagcagctacgcccacagccagagcttggaccggctgatgaatcctctgattgaccagtacctgtactacttgtctcggattcaaacaacaggaggcacggcaaatacgcagactctgggcttcagccaaggtgggcctaatacaatggccaatcaggcaaagaactggctgccaggaccctgttaccgccaacaacgcgtctcaacgacaaccgggcaaaacaacaatagcaactttgcctggactgctgggaccaaataccatctgaatggaagaaattcattggctaatcctggcatcgctatggcaacacacaaagacgacgaggagcgtttttttcccagtaacgggatcctgatttttggcaaacaaaatgctgccagagacaatgcggattacagcgatgtcatgcccaccagcgaggaagaaatcaaaaccactaaccctgtggccacagaggaatacggtatcgtggcagataacttgcagcagcaaaacacggctcctcaaattggaactgtcaacagccagggggccttacccggtatggtctggcagaaccgggacgtgtacctgcagggtcccatctgggccaagattcctcacacggacggcaacttccacccgtctccgctgatgggcggctttggcctgaaacatcctccgcctcagatcctgatcaagaacacgcctgtacctgcggatcctccgaccaccttcaaccagtcaaagctgaactctttcatcacgcaatacagcaccggacaggtcagcgtggaaattgaatgggagctgcagaaggaaaacagcaagcgctggaaccccgagatccagtacacctccaactactacaaatctacaagtgtggactttgctgttaatacagaaggcgtgtactctgaaccccgccccattggcacccgttacctcacccgtaatctgtaa

SEQ ID NO: 12483 - DNA, 2217 bp, Artificial Sequence
  source: /note="Description of Artificial Sequence: Synthetic polynucleotide"
atggctgccgatggttatcttccagattggctcgaggacaacctctctgagggcattcgcgagtggtgggcgctgaaacctggagccccgaagcccaaagccaaccagcaaaagcaggacgacggccggggtctggtgcttcctggctacaagtacctcggacccttcaacggactcgacaagggggagcccgtcaacgcggcggacgcggcggccctcgagcacgacaaggcctacgaccagcagctgcaggcgggtgacaatccgtacctgcggtataaccacgccgacgccgagtttcaggagcgtctgcaagaagatacgtcttttgggggcaacctcgggcgagcagtcttccaggccaagaagcgggttctcgaacctctcggtctggttgaggaaggcgctaagacggctcctggaaagaagagaccggtagagccatcaccccagcgttctccagacccctctacgggcatcggcaagaagggccaacagcccgccagaaaaagactcaattttggtcagactggcgactcagagtcagttccagaccctcaacctctcggagaacctccagcagcgccctctggtgtgggacctaatacaatggctgcaggcggtggcgcaccaatggcagacaataacgaaggcgccgacggagtgggtagttcctcgggaaattggcattgcgattccacatggctgggcgacagagtcatcaccaccagcacccgaacctgggccctgcccacctacaacaaccacctctacaagcaaatctccaacgggacatcgggaggagccaccaacgacaacacctacttcggctacagcaccccctgggggtattttgactttaacagattccactgccacttttcaccacgtgactggcagcgactcatcaacaacaactggggattccggcccaagagactcagcttcaagctcttcaacatccaggtcaaggaggtcacgcagaatgaaggcaccaagaccatcgccaataacctcaccagcaccatccaggtgtttacggactcggagtaccagctgccgtacgttctcggctctgcccaccagggctgcctgcctccgttcccggcggacgtgttcacgattccccagtacggctacctaacactcaacaacggtagtcaggccgtgggacgctcctccttctactgcctggaatactttccttcgcagatgctgagaaccggcaacaacttccagtttacttacaccttcgaggacgtgcctttccacagcagctacgcccacagccagagcttggaccggctgatgaatcctctgattgaccagtacctgtactacttgtctcggattcaaacaacaggaggcacggcaaatacgcagactctgggcttcagccaaggtgggcctaatacaatggccaatcaggcaaagaactggctgccaggaccctgttaccgccaacaacgcgtctcaacgacaaccgggcaaaacaacaatagcaactttgcctggactgctgggaccaaataccatctgaatggaagaaattcattggctaatcctggcatcgctatggcaacacacaaagacgacgaggagcgtttttttcccagtaacgggatcctgatttttggcaaacaaaatgctgccagagacaatgcggattacagcgatgtcatgcccaccagcgaggaagaaatcaaaaccactaaccctgtggccacagaggaatacggtatcgtggcagataacttgcagcagcaaaacacggctcctcaaattggaactgtcaacagccagggggccttacccggtatggtctggcagaaccgggacgtgtacctgcagggtcccatctgggccaagattcctcacacggacggcaacttccacccgtctccgctgatgggcggctttggcctgaaacatcctccgcctcagatcctgatcaagaacacgcctgtacctgcggatcctccgaccaccttcaaccagtcaaagctgaactctttcatcacgcaatacagcaccggacaggtcagcgtggaaattgaatgggagctgcagaaggaaaacagcaagcgctggaaccccgagatccagtacacctccaactactacaaatctacaagtgtggactttgctgttaatacagaaggcgtgtactctgaaccccgccccattggcacccgttacctcacccgtaatctgtaa

SEQ ID NO: 12484 - DNA, 2217 bp, Artificial Sequence
  source: /note="Description of Artificial Sequence: Synthetic polynucleotide"
atggctgccgatggttatcttccagattggctcgaggacaacctctctgagggcattcgcgagtggtgggcgctgaaacctggagccccgaagcccaaagccaaccagcaaaagcaggacgacggccggggtctggtgcttcctggctacaagtacctcggacccttcaacggactcgacaagggggagcccgtcaacgcggcggacgcggcggccctcgagcacgacaaggcctacgaccagcagctgcaggcgggtgacaatccgtacctgcggtataaccacgccgacgccgagtttcaggagcgtctgcaagaagatacgtcttttgggggcaacctcgggcgagcagtcttccaggccaagaagcgggttctcgaacctctcggtctggttgaggaaggcgctaagacggctcctggaaagaagagaccggtagagccatcaccccagcgttctccagactcctctacgggcatcggcaagaagggccaacagcccgccagaaaaagactcaattttggtcagactggcgactcagagtcagttccagaccctcaacctctcggagaacctccagcagcgccctctggtgtgggacctaatacaatggctgcaggcggtggcgcaccaatggcagacaataacgaaggcgccgacggagtgggtagttcctcgggaaattggcattgcgattccacatggctgggcgacagagtcatcaccaccagcacccgaacctgggccctgcccacctacaacaaccacctctacaagcaaatctccaacgggacatcgggaggagccaccaacgacaacacctacttcggctacagcaccccctgggggtattttgactttaacagattccactgccacttttcaccacgtgactggcagcgactcatcaacaacaactggggattccggcccaagagactcagcttcaagctcttcaacatccaggtcaaggaggtcacgcagaatgaaggcaccaagaccatcgccaataacctcaccagcaccatccaggtgtttacggactcggagtaccggctgccgtacgttctcggctctgcccaccagggctgcctgcctccgttcccggcggacgtgttcacgattccccagtacggctacctaacactcaacaacggtagtcaggccgtgggacgctcctccttctactgcctggaatactttccttcgcagatgctgagaaccggcaacaacttccagtttacttacaccttcgaggacgtgcctttccacagcagctacgcccacagccagagcttggaccggctgatgaatcctctgattgaccagtacctgtactacttgtctcggattcaaacaacaggaggcacggcaaatacgcagactctgggcttcagccaaggtgggcctaatacaatggccaatcaggcaaagaactggctgccaggaccctgttaccgccaacaacgcgtctcaacgacaaccgggcaaaacaacaatagcaactttgcctggactgctgggaccaaataccatctgaatggaagaaattcattggctaatcctggcatcgctatggcaacacacaaagacgacgaggagcgtttttttcccagtaacgggatcctgatttttggcaaacaaaatgctgccagagacaatgcggattacagcgatgtcatgcccaccagcgaggaagaaatcaaaaccactaaccctgtggccacagaggaatacggtatcgtggcagataacttgcagcagcaaaacacggctcctcaaattggaactgtcaacagccagggggccttacccggtatggtctggcagaaccgggacgtgtacctgcagggtcccatctgggccaagattcctcacacggacggcaacttccacccgtctccgctgatgggcggctttggcctgaaacatcctccgcctcagatcctgatcaagaacacgcctgtacctgcggatcctccgaccaccttcaaccagtcaaagctgaactctttcatcacgcaatacagcaccggacaggtcagcgtggaaattgaatgggagctgcagaaggaaaacagcaagcgctggaaccccgagatccagtacacctccaactactacaaatctacaagtgtggactttgctgttaatacagaaggcgtgtactctgaaccccgccccattggcacccgttacctcacccgtaatctgtaa

SEQ ID NO: 12485 - DNA, 2217 bp, Artificial Sequence
  source: /note="Description of Artificial Sequence: Synthetic polynucleotide"
atggctgccgatggttatcttccagattggctcgaggacaacctctctgagggcattcgcgagtggtgggcgctgaaacctggagccccgaagcccaaagccaaccagcaaaagcaggacgacggccggggtctggtgcttcctggctacaagtacctcggacccttcaacggactcgacaagggggagcccgtcaacgcggcggacgcggcggccctcgagcacgacaaggcctacgaccagcagctgcaggcgggtgacaatccgtacctgcggtataaccacgccgacgccgagtttcaggagcgtctgcaagaagatacgtcttttgggggcaacctcgggcgagcagtcttccaggccaagaagcgggttctcgaacctctcggtctggttgaggaaggcgctaagacggctcctggaaagaagagaccggtagagccatcaccccagcgttctccagactcctctacgggcatcggcaagaagggccaacagcccgccagaaaaagactcaattttggtcagactggcgactcagagtcagttccagaccctcaacctctcggagaacctccagcagcgccctctggtgtgggacctaatacaatggctgcaggcggtggcgcaccaatggcagacaataacgaaggcgccgacggagtgggtagttcctcgggaaattggcattgcgattccacatggctgggcgacagagtcatcaccaccagcacccgaacctgggccctgcccacctacaacaaccacctctacaagcaaatctccaacgggacatcgggaggagccaccaacgacaacacctacttcggctacagcaccccctgggggtattttgactttaacagattccactgccacttttcaccacgtgactggcagcgactcatcaacaacaactggggattccggcccaagagactcagcttcaagctcttcaacatccaggtcaaggaggtcacgcagaatgaaggcaccaagaccatcgccaataacctcaccagcaccatccaggtgtttacggactcggagtaccagctgccgtacgttctcggctctgcccaccagggctgcctgcctccgttcccggcggacgtgttcacgattccccagtacggctacctaacactcaacaacggtagtcaggccgtgggacgctcctccttctactgcctggaatactttccttcgcagatgctgagaaccggcaacaacttccagtttacttacaccttcgaggacgtgcctttccacagcagctacgcccacagccagagcttggaccggctgatgaatcctctgattgaccagtacctgtactacttgtctcggattcaaacaacaggaggcacggcaaatacgcagactctgggcttcagccaaggtgggcctaatacaatggccaatcaggcaaagaactggctgccaggaccctgttaccgccaacaacgcgtctcaacgacaaccgggcaaaacaacaatagcaactttgcctggactgctgggaccaaataccatctgaatggaagaaattcattggctaatcctggcatcgctatggcaacacacaaagacgacgaggagcgtttttttcccagtaacgggatcctgatttttggcaaacaaaatgctgccagagacaatgcggattacagcgatgtcatgcccaccagcgaggaagaaatcaaaaccactaaccctgtggccacagaggaatacggtatcgtggcagataacttgcagcagcaaaacacggctcctcaaattggaactgtcaacagccagggggccttacccggtatggtctggcagaaccgggacgtgtacctgcagggtcccatctgggccaagattcctcacacggacggcaacttccacccgtctccgctgatgggcggctttggcctgaaacatcctccgcctcagatcctgatcaagaacacgcctgtacctgcggatcctccgaccaccttcaaccagccaaagctgaactctttcatcacgcaatacagcaccggacaggtcagcgtggaaattgaatgggagctgcagaaggaaaacagcaagcgctggaaccccgagatccagtacacctccaactactacaaatctacaagtgtggactttgctgttaatacagaaggcgtgtactctgaaccccgccccattggcacccgttacctcacccgtaatctgtaa

SEQ ID NO: 12486 - DNA, 2217 bp, Artificial Sequence
  source: /note="Description of Artificial Sequence: Synthetic polynucleotide"
atggctgccgatggttatcttccagattggctcgaggacaacctctctgagggcattcgcgagtggtgggcgctgaaacctggagccccgaagcccaaagccaaccagcaaaagcaggacgacggccggggtctggtgcttcctggctacaagtacctcggacccttcaacggactcgacaagggggagcccgtcaacgcggcggacgcggcggccctcgagcacgacaaggcctacgaccagcagctgcaggcgggtggcaatccgtacctgcggtataaccacgccgacgccgagtttcaggagcgtctgcaagaagatacgtcttttgggggcaacctcgggcgagcagtcttccaggccaagaagcgggttctcgaacctctcggtctggttgaggaaggcgctaagacggctcctggaaagaagagaccggtagagccatcaccccagcgttctccagactcctctacgggcatcggcaagaagggccaacagcccgccagaaaaagactcaattttggtcagactggcgactcagagtcagttccagaccctcaacctctcggagaacctccagcagcgccctctggtgtgggacctaatacaatggctgcaggcggtggcgcaccaatggcagacaataacgaaggcgccgacggagtgggtagttcctcgggaaattggcattgcgattccacatggctgggcgacagagtcatcaccaccagcacccgaacctgggccctgcccacctacaacaaccacctctacaagcaaatctccaacgggacatcgggaggagccaccaacgacaacacctacttcggctacagcaccccctgggggtattttgactttaacagattccactgccacttttcaccacgtgactggcagcgactcatcaacaacaactggggattccggcccaagagactcagcttcaagctcttcaacatccaggtcaaggaggtcacgcagaatgaaggcaccaagaccatcgccaataacctcaccagcaccatccaggtgtttacggactcggagtaccagctgccgtacgttctcggctctgcccaccagggctgcctgcctccgttcccggcggacgtgttcacgattccccagtacggctacctaacactcaacaacggtagtcaggccgtgggacgctcctccttctactgcctggaatactttccttcgcagatgctgagaaccggcaacaacttccagtttacttacaccttcgaggacgtgcctttccacagcagctacgcccacagccagagcttggaccggctgatgaatcctctgattgaccagtacctgtactacttgtctcggattcaaacaacaggaggcacggcaaatacgcagactctgggcttcagccaaggtgggcctaatacaatggccaatcaggcaaagaactggctgccaggaccctgttaccgccaacaacgcgtctcaacgacaaccgggcaaaacaacaatagcaactttgcctggactgctgggaccaaataccatctgaatggaagaaattcattggctaatcctggcatcgctatggcaacacacaaagacgacgaggagcgtttttttcccagtaacgggatcctgatttttggcaaacaaaatgctgccagagacaatgcggattacagcgatgtcatgcccaccagcgaggaagaaatcaaaaccactaaccctgtggccacagaggaatacggtatcgtggcagataacttgcagcagcaaaacacggctcctcaaattggaactgtcaacagccagggggccttacccggtatggtctggcagaaccgggacgtgtacctgcagggtcccatctgggccaagattcctcacacggacggcaacttccacccgtctccgctgatgggcggctttggcctgaaacatcctccgcctcagatcctgatcaagaacacgcctgtacctgcggatcctccgaccaccttcaaccagtcaaagctgaactctttcatcacgcaatacagcaccggacaggtcagcgtggaaattgaatgggagctgcagaaggaaaacagcaagcgctggaaccccgagatccagtacacctccaactactacaaatctacaagtgtggactttgctgttaatacagaaggcgtgtactctgaaccccgccccattggcacccgttacctcacccgtaatctgtaa

SEQ ID NO: 12487 - DNA, 2217 bp, Artificial Sequence
  source: /note="Description of Artificial Sequence: Synthetic polynucleotide"
atggctgccgatggttatcttccagattggctcgaggacaacctctctgagggcattcgcgagtggtgggcgctgaaacctggagccccgaagcccaaagccaaccagcaaaagcaggacgacggccggggtctggtgcttcctggctacaagtacctcggacccttcaacggactcgacaagggggagcccgtcaacgcggcggacgcggcggccctcgagcacgacaaggcctacgaccagcagctgcaggcgggtgacaatccgtacctgcggtataaccacgccgacgccgagtttcaggagcgtctgcaagaagatacgtcttttgggggcaacctcgggcgagcagtcttccaggccaagaagcgggttctcgaacctctcggtctggttgaggaaggcgctaagacggctcctggaaagaagagaccggtagagccatcaccccagcgttctccagactcctctacgggcatcggcaagaagggccaacagcccgccagaaaaagactcaattttggtcagactggcgactcagagtcagttccagaccctcaacctctcggagaacctccagcagcgccctctggtgtgggacctaatacaatggctgcaggcggtggcgcaccaatggcagacaataacgaaggcgccgacggagtgggtagttcctcgggaaattggcattgcgattccacatggctgggcgacagagtcatcaccaccagcacccgaacctgggccctgcccacctacaacaaccacctctacaagcaaatctccaacgggacatcgggaggagccaccaacgacaacacctacttcggctacagcaccccctgggggtattttgactttaacagattccactgccacttttcaccacgtgactggcagcgactcatcaacaacaactggggattccggcccaagagactcagcttcaagctcttcaacatccaggtcaaggaggtcacgcagaatgaaggcaccaagaccatcgccaataacctcaccagcaccatccaggtgtttacggactcggagtaccagctgccgtacgttctcggctctgcccaccagggctgcctgcctccgttcccggcggacgtgttcacgattccccagtacggctacctaacactcaacaacggtagtcaggccgtgggacgctcctccttctactgcctggaatactttccttcgcagatgctgagaaccggcaacaacttccagtttacttacaccttcgaggacgtgcctttccacagcagctacgcccacagccagagcttggaccggctgatgaatcctctgattgaccagtacctgtactacttgtctcggattcaaacaacaggaggcacggcaaatacgcagactctgggcttcagccaaggtgggcctaatacaatggccaatcaggcaaagaactggctgccaggaccctgttaccgccaacaacgcgtctcaacggcaaccgggcaaaacaacaatagcaactttgcctggactgctgggaccaaataccatctgaatggaagaaattcattggctaatcctggcatcgctatggcaacacacaaagacgacgaggagcgtttttttcccagtaacgggatcctgatttttggcaaacaaaatgctgccagagacaatgcggattacagcgatgtcatgcccaccagcgaggaagaaatcaaaaccactaaccctgtggccacagaggaatacggtatcgtggcagataacttgcagcagcaaaacacggctcctcaaattggaactgtcaacagccagggggccttacccggtatggtctggcagaaccgggacgtgtacctgcagggtcccatctgggccaagattcctcacacggacggcaacttccacccgtctccgctgatgggcggctttggcctgaaacatcctccgcctcagatcctgatcaagaacacgcctgtacctgcggatcctccgaccaccttcaaccagtcaaagctgaactctttcatcacgcaatacagcaccggacaggtcagcgtggaaattgaatgggagctgcagaaggaaaacagcaagcgctggaaccccgagatccagtacacctccaactactacaaatctacaagtgtggactttgctgttaatacagaaggcgtgtactctgaaccccgccccattggcacccgttacctcacccgtaatctgtaa

SEQ ID NO: 12488 - DNA, 2217 bp, Artificial Sequence
  source: /note="Description of Artificial Sequence: Synthetic polynucleotide"
atggctgccgatggttatcttccagattggctcgaggacaacctctctgagggcattcgcgagtggtgggcgctgaaacctggagccccgaagcccaaagccaaccagcaaaagcaggacgacggccggggtctggtgcttcctggctacaagtacctcggacccttcaacggactcgacaagggggagcccgtcaacgcggcggacgcggcggccctcgagcacgacaaggcctacgaccagcagctgcaggcgggtgacaatccgtacctgcggtataaccacgccgacgccgagtttcaggagcgtctgcaagaagatacgtcttttgggggcaacctcgggcgagcagtcttccaggccaagaagcgggttctcgaacctctcggtctggttgaggaaggcgctaagacggctcctggaaagaagagaccggtagagccatcaccccagcgttctccagactcctctacgggcatcggcaagaagggccaacagcccgccagaaaaagactcaattttggtcagactggcgactcagagtcagttccagaccctcaacctctcggagaacctccagcagcgccctctggtgtgggacctaatacaatggctgcaggcggtggcgcaccaatggcagacaataacgaaggcgccgacggagtgggtagttcctcgggaaattggcattgcgattccacatggctgggcgacagagtcatcaccaccagcacccgaacctgggccctgcccacctacaacaaccacctctacaagcaaatctccaacgggacatcgggaggagccaccaacgacaacacctacttcggctacagcaccccctgggggtattttgactttaacagattccactgccacttttcaccacgtgactggcagcgactcatcaacaacaactggggattccggcccaagagactcagcttcaagctcttcaacatccaggtcaaggaggtcacgcagaatgaaggcaccaagaccatcgccaataacctcaccagcaccatccaggtgtttacggactcggagtaccagctgccgtacgttctcggctctgcccaccagggctgcccgcctccgttcccggcggacgtgttcacgattccccagtacggctacctaacactcaacaacggtagtcaggccgtgggacgctcctccttctactgcctggaatactttccttcgcagatgctgagaaccggcaacaacttccagtttacttacaccttcgaggacgtgcctttccacagcagctacgcccacagccagagcttggaccggctgatgaatcctctgattgaccagtacctgtactacttgtctcggattcaaacaacaggaggcacggcaaatacgcagactctgggcttcagccaaggtgggcctaatacaatggccaatcaggcaaagaactggctgccaggaccctgttaccgccaacaacgcgtctcaacgacaaccgggcaaaacaacaatagcaactttgcctggactgctgggaccaaataccatctgaatggaagaaattcattggctaatcctggcatcgctatggcaacacacaaagacgacgaggagcgtttttttcccagtaacgggatcctgatttttggcaaacaaaatgctgccagagacaatgcggattacagcgatgtcatgcccaccagcgaggaagaaatcaaaaccactaaccctgtggccacagaggaatacggtatcgtggcagataacttgcagcagcaaaacacggctcctcaaattggaactgtcaacagccagggggccttacccggtatggtctggcagaaccgggacgtgtacctgcagggtcccatctgggccaagattcctcacacggacggcaacttccacccgtctccgctgatgggcggctttggcctgaaacatcctccgcctcagatcctgatcaagaacacgcctgtacctgcggatcctccgaccaccttcaaccagtcaaagctgaactctttcatcacgcaatacagcaccggacaggtcagcgtggaaattgaatgggagctgcagaaggaaaacagcaagcgctggaaccccgagatccagtacacctccaactactacaaatctacaagtgtggactttgctgttaatacagaaggcgtgtactctgaaccccgccccattggcacccgttacctcacccgtaatctgtaa

SEQ ID NO: 12489 - DNA, 2217 bp, Artificial Sequence
  source: /note="Description of Artificial Sequence: Synthetic polynucleotide"
atggctgccgatggttatcttccagattggctcgaggacaacctctctgagggcattcgcgagtggtgggcgctgaaacctggagccccgaagcccaaagccaaccagcaaaagcaggacgacggccggggtctggtgcttcctggctacaagtacctcggacccttcaacggactcgacaagggggagcccgtcaacgcggcggacgcggcggccctcgagcacgacaaggcctacgaccagcagccgcaggcgggtgacaatccgtacctgcggtataaccacgccgacgccgagtttcaggagcgtctgcaagaagatacgtcttttgggggcaacctcgggcgagcagtcttccaggccaagaagcgggttctcgaacctctcggtctggttgaggaaggcgctaagacggctcctggaaagaagagaccggtagagccatcaccccagcgttctccagactcctctacgggcatcggcaagaagggccaacagcccgccagaaaaagactcaattttggtcagactggcgactcagagtcagttccagaccctcaacctctcggagaacctccagcagcgccctctggtgtgggacctaatacaatggctgcaggcggtggcgcaccaatggcagacaataacgaaggcgccgacggagtgggtagttcctcgggaaattggcattgcgattccacatggctgggcgacagagtcatcaccaccagcacccgaacctgggccctgcccacctacaacaaccacctctacaagcaaatctccaacgggacatcgggaggagccaccaacgacaacacctacttcggctacagcaccccctgggggtattttgactttaacagattccactgccacttttcaccacgtgactggcagcgactcatcaacaacaactggggattccggcccaagagactcagcttcaagctcttcaacatccaggtcaaggaggtcacgcagaatgaaggcaccaagaccatcgccaataacctcaccagcaccatccaggtgtttacggactcggagtaccagctgccgtacgttctcggctctgcccaccagggctgcctgcctccgttcccggcggacgtgttcacgattccccagtacggctacctaacactcaacaacggtagtcaggccgtgggacgctcctccttctactgcctggaatactttccttcgcagatgctgagaaccggcaacaacttccagtttacttacaccttcgaggacgtgcctttccacagcagctacgcccacagccagagcttggaccggctgatgaatcctctgattgaccagtacctgtactacttgtctcggattcaaacaacaggaggcacggcaaatacgcagactctgggcttcagccaaggtgggcctaatacaatggccaatcaggcaaagaactggctgccaggaccctgttaccgccaacaacgcgtctcaacgacaaccgggcaaaacaacaatagcaactttgcctggactgctgggaccaaataccatctgaatggaagaaattcattggctaatcctggcatcgctatggcaacacacaaagacgacgaggagcgtttttttcccagtaacgggatcctgatttttggcaaacaaaatgctgccagagacaatgcggattacagcgatgtcatgcccaccagcgaggaagaaatcaaaaccactaaccctgtggccacagaggaatacggtatcgtggcagataacttgcagcagcaaaacacggctcctcaaattggaactgtcaacagccagggggccttacccggtatggtctggcagaaccgggacgtgtacctgcagggtcccatctgggccaagattcctcacacggacggcaacttccacccgtctccgctgatgggcggctttggcctgaaacatcctccgcctcagatcctgatcaagaacacgcctgtacctgcggatcctccgaccaccttcaaccagtcaaagctgaactctttcatcacgcaatacagcaccggacaggtcagcgtggaaattgaatgggagctgcagaaggaaaacagcaagcgctggaaccccgagatccagtacacctccaactactacaaatctacaagtgtggactttgctgttaatacagaaggcgtgtactctgaaccccgccccattggcacccgttacctcacccgtaatctgtaa

SEQ ID NO: 12490 - DNA, 2217 bp, Artificial Sequence
  source: /note="Description of Artificial Sequence: Synthetic polynucleotide"
atggctgccgatggttatcttccagattggctcgaggacaacctctctgagggcattcgcgagtggtgggcgctgaaacctggagccccgaagcccaaagccaaccagcaaaagcaggacgacggccggggtctggtgcttcctggctacaagtacctcggacccttcaacggactcgacaagggggagcccgtcaacgcggcggacgcggcggccctcgagcacgacaaggcctacgaccagcagctgcaggcgggtgacaatccgtacctgcggtataaccacgccgacgccgagtttcaggagcgtctgcaagaagatacgtcttttgggggcaacctcgggcgagcagtcttccaggccaagaagcgggttctcgaacctctcggtctggttgaggaaggcgctaagacggctcctggaaagaagagaccggtagagccatcaccccagcgttctccagactcctctacgggcatcggcaagaagggccaacagcccgccagaaaaagactcaattttggtcagactggcgactcagagtcagttccagaccctcaacctctcggagaacctccagcagcgccctctggtgtgggacctaatacaatggctgcaggcggtggcgcaccaatggcagacaataacgaaggcgccgacggagtgggtagttcctcgggaaattggcattgcgattccacatggctgggcgacagagtcatcaccaccagcacccgaacctgggccctgcccacctacaacaaccacctctacaagcaaatctccaacgggacatcgggaggagccaccaacgacaacacctacttcggctacagcaccccctgggggtattttgactttaacagattccactgccacttttcaccacgtgactggcagcgactcatcaacaacaactggggattccggcccaagagactcagcttcaagctcttcaacatccaggtcaaggaggtcacgcagaatgaaggcaccaagaccatcgccaataacctcaccagcaccatccaggtgtttacggactcggagtaccagctgccgtacgttctcggctctgcccaccagggctgcctgcctccgttcccggcggacgtgttcacgattccccagtacggctacctaacactcaacaacggtagtcaggccgtgggacgctcctccttctactgcctggaataccttccttcgcagatgctgagaaccggcaacaacttccagtttacttacaccttcgaggacgtgcctttccacagcagctacgcccacagccagagcttggaccggctgatgaatcctctgattgaccagtacctgtactacttgtctcggattcaaacaacaggaggcacggcaaatacgcagactctgggcttcagccaaggtgggcctaatacaatggccaatcaggcaaagaactggctgccaggaccctgttaccgccaacaacgcgtctcaacgacaaccgggcaaaacaacaatagcaactttgcctggactgctgggaccaaataccatctgaatggaagaaattcattggctaatcctggcatcgctatggcaacacacaaagacgacgaggagcgtttttttcccagtaacgggatcctgatttttggcaaacaaaatgctgccagagacaatgcggattacagcgatgtcatgcccaccagcgaggaagaaatcaaaaccactaaccctgtggccacagaggaatacggtatcgtggcagataacttgcagcagcaaaacacggctcctcaaattggaactgtcaacagccagggggccttacccggtatggtctggcagaaccgggacgtgtacctgcagggtcccatctgggccaagattcctcacacggacggcaacttccacccgtctccgctgatgggcggctttggcctgaaacatcctccgcctcagatcctgatcaagaacacgcctgtacctgcggatcctccgaccaccttcaaccagtcaaagctgaactctttcatcacgcaatacagcaccggacaggtcagcgtggaaattgaatgggagctgcagaaggaaaacagcaagcgctggaaccccgagatccagtacacctccaactactacaaatctacaagtgtggactttgctgttaatacagaaggcgtgtactctgaaccccgccccattggcacccgttacctcacccgtaatctgtaa

SEQ ID NO: 12491 - DNA, 2217 bp, Artificial Sequence
  source: /note="Description of Artificial Sequence: Synthetic polynucleotide"
atggctgccgatggttatcttccagattggctcgaggacaacctctctgagggcattcgcgagtggtgggcgctgaaacctggagccccgaagcccaaagccaaccagcaaaagcaggacgacggccggggtctggtgcttcctggctacaagtacctcggacccttcaacggactcgacaagggggagcccgtcaacgcggcggacgcggcggccctcgagcacgacaaggcctacgaccagcagctgcgggcgggtgacaatccgtacctgcggtataaccacgccgacgccgagtttcaggagcgtctgcaagaagatacgtcttttgggggcaacctcgggcgagcagtcttccaggccaagaagcgggttctcgaacctctcggtctggttgaggaaggcgctaagacggctcctggaaagaagagaccggtagagccatcaccccagcgttctccagactcctctacgggcatcggcaagaaggaccaacagcccgccagaaaaagactcaattttggtcagactggcgactcagagtcagttccagaccctcaacctctcggagaacctccagcagcgccctctggtgtgggacctaatacaatggctgcaggcggtggcgcaccaatggcagacaataacgaaggcgccgacggagtgggtagttcctcgggaaattggcattgcgattccacatggctgggcgacagagtcatcaccaccagcacccgaacctgggccctgcccacctacaacaaccacctctacaagcaaatctccaacgggacatcgggaggagccaccaacgacaacacctacttcggctacagcaccccctgggggtattttgactttaacagattccactgccacttttcaccacgtgactggcagcgactcatcaacaacaactggggattccggcccaagagactcagcttcaagctcttcaacatccaggtcaaggaggtcacgcagaatgaaggcaccaagaccatcgccaataacctcaccagcaccatccaggtgtttacggactcggagtaccagctgccgtacgttctcggctctgcccaccagggctgcctgcctccgttcccggcggacgtgttcacgattccccagtacggctacctaacactcaacaacggtagtcaggccgtgggacgctcctccttctactgcctggaatactttccttcgcagatgctgagaaccggcaacaacttccagtttacttacaccttcgaggacgtgcctttccacagcagctacgcccacagccagagcttggaccggctgatgaatcctctgattgaccagtacctgtactacttgtctcggattcaaacaacaggaggcacggcaaatacgcagactctgggcttcagccaaggtgggcctaatacaatggccaatcaggcaaagaactggctgccaggaccctgttaccgccaacaacgcgtctcaacgacaaccgggcaaaacaacaatagcaactttgcctggactgctgggaccaaataccatctgaatggaagaaattcattggctaatcctggcatcgctatggcaacacacaaagacgacgaggagcgtttttttcccagtaacgggatcctgatttttggcaaacaaaatgctgccagagacaatgcggattacagcgatgtcatgcccaccagcgaggaagaaatcaaaaccactaaccctgtggccacagaggaatacggtatcgtggcagataacttgcagcagcaaaacacggctcctcaaattggaactgtcaacagccagggggccttacccggtatggtctggcagaaccgggacgtgtacctgcagggtcccatctgggccaagattcctcacacggacggcaacttccacccgtctccgctgatgggcggctttggcctgaaacatcctccgcctcagatcctgatcaagaacacgcctgtacctgcggatcctccgaccaccttcaaccagtcaaagctgaactctttcatcacgcaatacagcaccggacaggtcagcgtggaaattgaatgggagctgcagaaggaaaacagcaagcgctggaaccccgagatccagtacacctccaactactacaaatctacaagtgtggactttgctgttaatacagaaggcgtgtactctgaaccccgccccattggcacccgttacctcacccgtaatctgtaa

SEQ ID NO: 12492 - DNA, 2217 bp, Artificial Sequence
  source: /note="Description of Artificial Sequence: Synthetic polynucleotide"
atggctgccgatggttatcttccagattggctcgaggacaacctctctgagggcattcgcgagtggtgggcgctgaaacctggagccccgaagcccaaagccaaccagcaaaagcaggacgacggccggggtctggtgcttcctggctacaagtacctcggacccttcaacggactcgacaagggggagcccgtcaacgcggcggacgcggcggccctcgagcacgacaaggcctacgaccagcagctgcaggcgggtgacaatccgtacctgcggtataaccacgccgacgccgagtttcaggagcgtctgcaagaagatacgtcttttgggggcaacctcgggcgagcagtcttccaggccaagaagcgggttctcgaacctctcggtctggttgaggaaggcgctaagacggctcctggaaagaagagaccggtagagccatcaccccagcgttctccagactcctctacgggcatcggcaagaagggccaacagcccgccagaaaaagactcaattttggtcagactggcgactcagagtcagttccagaccctcaacctctcggagaacctccagcagcgccctctggtgtgggacctaatacaatggctgcaggcggtggcgcaccaatggcagacaataacgaaggcgccgacggagtgggtagttcctcgggaaattggcattgcgattccacatggctgggcgacagagtcatcaccaccagcacccgaacctgggccctgcccacctacaacaaccacctctacaagcaaatctccaacgggacatcgggaggagccaccaacgacaacacctacttcggctacagcaccccctgggggtattttgactttaacagattccactgccacttttcaccacgtgactggcagcgactcatcaacaacaactggggattccggcccaagagactcagcttcaagctcttcaacatccaggtcaaggaggtcacgcagaatgaaggcaccaagaccatcgccaataacctcaccagcaccatccaggtgtttacggactcggagtaccagctgccgtacgttctcggctctgcccaccagggctgcctgcctccgttcccggcggacgtgttcacgattccccagtacggctacctaacactcaacaacggtagtcaggccgtgggacgctcctccttctactgcctggaatactttccttcgcagatgctgagaaccggcaacaacttccagtttacttacaccttcgaggacgtgcctttccacagcagctacgcccacagccagagcttggaccggctgatgaatcctctgattgaccagtacctgtactacttgtctcggattcaaacaacaggaggcacggcaaatacgcagactctgggcttcagccaaggtgggcctaatacaatggccaatcaggcaaagaactggctgccaggaccctgttaccgccaacaacgcgtctcaacgacaaccgggcaaaacaacaatagcaactttgcctggactgctgggaccaaataccatctgaatggaagaaattcattggctaatcctggcatcgctatggcaacacacaaagacgacgaggagcgtttttttcccagtaacgggatcctgatttttggcaaacaaaatgctgccagagacaatgcggattacagcgatgtcatgcccaccagcgaggaagaaatcaaaaccactaaccctgtggccacagaggaatacggtatcgtggcagataacttgcagcagcaaaacacggctcctcaaattggaactgtcaacagccagggggccttacccggtatggtctggcagaaccgggacgtgtacctgcagggtcccatctgggccaagattcctcgcacggacggcaacttccacccgtctccgctgatgggcggctttggcctgaaacatcctccgcctcagatcctgatcaagaacacgcctgtgcctgcggatcctccgaccaccttcaaccagtcaaagctgaactctttcatcacgcaatacagcaccggacaggtcagcgtggaaattgaatgggagctgcagaaggaaaacagcaagcgctggaaccccgagatccagtacacctccaactactacaaatctacaagtgtggactttgctgttaatacagaaggcgtgtactctgaaccccgccccattggcacccgttacctcacccgtaatctgtaa

SEQ ID NO: 12493 - DNA, 2217 bp, Artificial Sequence
  source: /note="Description of Artificial Sequence: Synthetic polynucleotide"
atggctgccgatggttatcttccagattggctcgaggacaacctctctgagggcattcgcgagtggtgggcgctgaaacctggagccccgaagcccaaagccaaccagcaaaagcaggacgacggccggggtctggtgcttcctggctacaagtacctcggacccttcaacggactcgacaagggggagcccgtcaacgcggcggacgcggcggccctcgagcacgacaaggcctacgaccagcagctgcaggcgggtgacaatccgtacctgcggtataaccacgccgacgccgagtttcaggagcgtctgcaagaagatacgtcttttgggggcaacctcgggcgagcagtcttccaggccaagaagcgggttctcgaacctctcggtctggttgaggaaggcgctaagacggctcctggaaagaagagaccggtagagccatcaccccagcgttctccagactcctctacgggcatcggcaagaagggccaacagcccgccagaaaaagactcaattttggtcagactggcgactcagagtcagttccagaccctcaacctctcggagaacctccagcagcgccctctggtgtgggacctaatacaatggctgcaggcggtggcgcaccaatggcagacaataacgaaggcgccgacggagtgggtagttcctcgggaaattggcattgcgattccacatggctgggcgacagagtcatcaccaccagcacccgaacctgggccctgcccacctacaacaaccacctctacaagcaaatctccaacgggacatcgggaggagccaccaacgacaacacctacttcggctacagcaccccctgggggtattttgactttaacagattccactgccacttttcaccacgtgactggcagcgactcatcaacaacaactggggattccggcccaagagactcagcttcaagctcttcaacatccaggtcaaggaggtcacgcagaatgaaggcaccaagaccatcgccaataacctcaccagcaccatccaggtgtttacggactcggagtaccagctgccgtacgttctcggctctgcccaccagggctgcctgcctccgttcccggcggacgtgttcacgattccccagtacggctacctaacactcaacaacggtagtcaggccgtgggacgctcctccttctactgcctggaatactttccttcgcagatgctgagaaccggcaacaacttccagtttacttacaccttcgaggacgtgcctttccacagcagctacgcccacagccagagcttggaccggctgatgaatcctctgattgaccagtacctgtactacttgtctcggattcaaacaacaggaggcacggcaaatacgcagactctgggcttcagccaaggtgggcctaatacaatggccaatcaggcaaagaactggctgccaggaccctgttaccgccaacaacgcgtctcaacgacaaccgggcaaaacaacaatagcaactttgcctggactgctgggaccaaataccatctgaatggaagaaattcattggctaatcctggcatcgctatggcaacacacaaagacgacgaggagcgtttttttcccagtaacgggatcctgatttttggcaaacaaaatgctgccagagacaatgcggattacagcgatgtcatgcccaccagcgaggaagaaatcaaaaccactaaccctgtggccacagaggaatacggtatcgtggcagataacttgcagcagcaaaacacggctcctcaaattggaactgtcaacagccagggggccttacccggtatggtctggcagaaccgggacgtgtacctgcagggtcccatctgggccaagattcctcacacggacggcaacttccacccgtctccgctgatgggcggctttggcctgaaacatcctccgcctcagatcctgatcaagaacacgcctgtacctgcggatcctccgaccaccttcaaccagtcaaagctgaactctttcatcacgcaatacagcaccggacaggtcagcgtggaaattggatgggagctgcagaaggaaaacagcaagcgctggaaccccgagatccagtacacctccaactactacaaatctacaagtgtggactttgctgttaatacagaaggcgtgtactctgaaccccgccccattggcacccgttacctcacccgtaatctgtaa

SEQ ID NO: 12494 - DNA, 2217 bp, Artificial Sequence
  source: /note="Description of Artificial Sequence: Synthetic polynucleotide"
atggctgccgatggttatcttccagattggctcgaggacaacctctctgagggcattcgcgagtggtgggcgctgaaacctggagccccgaagcccaaagccaaccagcaaaagcaggacgacggccggggtctggtgcttcctggctacaagtacctcggacccttcaacggactcgacaagggggagcccgtcaacgcggcggacgcggcggccctcgagcacgacaaggcctacgaccagcagctgcaggcgggtgacaatccgtacctgcggtataaccacgccgacgccgagtttcaggagcgtctgcaagaagatacgtcttttgggggcaacctcgggcgagcagtcttccaggccaagaagcgggttctcgaacctctcggtctggttgaggaaggcgctaagacggctcctggaaagaagagaccggtagagccatcaccccagcgttctccagactcctctacgggcatcggcaagaagggccaacagcccgccagaaaaagactcaattttggtcagactggcgactcagagtcagttccagaccctcaacctctcggagaacctccagcagcgccctctggtgtgggacctaatacaatggctacaggcggtggcgcaccaatggcagacaataacgaaggcgccgacggagtgggtagttcctcgggaaattggcattgcgattccacatggctgggcgacagagtcatcaccaccagcacccgaacctgggccctgcccacctacaacaaccacctctacaagcaaatctccaacgggacatcgggaggagccaccaacgacaacacctacttcggctacagcaccccctgggggtattttgactttaacagattccactgccacttttcaccacgtgactggcagcgactcatcaacaacaactggggattccggcccaagagactcagcttcaagctcttcaacatccaggtcaaggaggtcacgcagaatgaaggcaccaagaccatcgccaataacctcaccagcaccatccaggtgtttacggactcggagtaccagctgccgtacgttctcggctctgcccaccagggctgcctgcctccgttcccggcggacgtgttcacgattccccagtacggctacctaacactcaacaacggtagtcaggccgtgggacgctcctccttctactgcctggaatactttccttcgcagatgctgagaaccggcaacaacttccagtttacttacaccttcgaggacgtgcctttccacggcagctacgcccacagccagagcttggaccggctgatgaatcctctgattgaccagtacctgtactacttgtctcggattcaaacaacaggaggcacggcaaatacgcagactctgggcttcagccaaggtgggcctaatacaatggccaatcaggcaaagaactggctgccaggaccctgttaccgccaacaacgcgtctcaacgacaaccgggcaaaacaacaatagcaactttgcctggactgctgggaccaaataccatctgaatggaagaaattcattggctaatcctggcatcgctatggcaacacacaaagacgacgaggagcgtttttttcccagtaacgggatcctgatttttggcaaacaaaatgctgccagagacaatgcggattacagcgatgtcatgcccaccagcgaggaagaaatcaaaaccactaaccctgtggccacagaggaatacggtatcgtggcagataacttgcagcagcaaaacacggctcctcaaattggaactgtcaacagccagggggccttacccggtatggtctggcagaaccgggacgtgtacctgcagggtcccatctgggccaagattcctcacacggacggcaacttccacccgtctccgctgatgggcggctttggcctgaaacatcctccgcctcagatcctgatcaagaacacgcctgtacctgcggatcctccgaccaccttcaaccagtcaaagctgaactctttcatcacgcaatacagcaccggacaggtcagcgtggaaattgaatgggagctgcagaaggaaaacagcaagcgctggaaccccgagatccagtacacctccaactactacaaatctacaagtgtggactttgctgttaatacagaaggcgtgtactctgaaccccgccccattggcacccgttacctcacccgtaatctgtaa

SEQ ID NO: 12495 - DNA, 2217 bp, Artificial Sequence
  source: /note="Description of Artificial Sequence: Synthetic polynucleotide"
atggctgccgatggttatcttccagattggctcgaggacaacctctctgagggcattcgcgagtggtgggcgctgaaacctggagccccgaagcccaaagccaaccagcaaaagcaggacgacggccggggtctggtgcttcctggctacaagtacctcggacccttcaacggactcgacaagggggagcccgtcaacgcggcggacgcggcggccctcgagcacgacaaggcctacgaccagcagctgcaggcgggtgacaatccgtacctgcggtataaccacgccgacgccgagtttcaggagcgtctgcaagaagatacgtcttttgggggcaacctcgggcgagcagtcttccaggccaagaagcgggttctcgaacctctcggtctggttgaggaaggcgctaagacggctcctggaaagaagagaccggtagagccatcaccccagcgttctccagactcctctacgggcatcggcaagaagggccaacagcccgccagaaaaagactcaattttggtcagactggcgactcagagtcagttccagaccctcaacctctcggagaacctccagcagcgccctctggtgtgggacctaatacaatggctgcaggcggtggcgcaccaatggcagacaataacgaaggcgccgacggagtgggtagttcctcgggaaattggcattgcgattccacatggctgggcgacagagtcatcaccaccagcacccgaacctgggccctgcccacctacaacaaccacctctacaagcaaatctccaacgggacatcgggaggagccaccaacgacaacacctacttcggctacagcaccccctgggggtattttgactttaacagattccactgccacttttcaccacgtgactggcagcgactcatcaacaacaactggggattccggcccaagagactcagcttcaagctcttcaacatccaggtcaaggaggtcacgcagaatgaaggcaccaagaccatcgccaataacctcaccagcaccatccaggtgtttacggactcggagtacctgctgccgtacgttctcggctctgcccaccagggctgcctgcctccgttcccggcggacgtgttcacgattccccagtacggctacctaacactcaacaacggtagtcaggccgtgggacgctcctccttctactgcctggaatactttccttcgcagatgctgagaaccggcaacaacttccagtttacttacaccttcgaggacgtgcctttccacagcagctacgcccacagccagagcttggaccggctgatgaatcctctgattgaccagtacctgtactacttgtctcggattcaaacaacaggaggcacggcaaatacgcagactctgggcttcagccaaggtgggcctaatacaatggccaatcaggcaaagaactggctgccaggaccctgttaccgccaacaacgcgtctcaacgacaaccgggcaaaacaacaatagcaactttgcctggactgctgggaccaaataccatctgaatggaagaaattcattggctaatcctggcatcgctatggcaacacacaaagacgacgaggagcgtttttttcccagtaacgggatcctgatttttggcaaacaaaatgctgccagagacaatgcggattacagcgatgtcatgcccaccagcgaggaagaaatcaaaaccactaaccctgtggccacagaggaatacggtatcgtggcagataacttgcagcagcaaaacacggctcctcaaattggaactgtcaacagccagggggccttacccggtatggtctggcagaaccgggacgtgtacctgcagggtcccatctgggccaagattcctcacacggacggcaacttccacccgtctccgctgatgggcggctttggcctgaaacatcctccgcctcagatcctgatcaagaacacgcctgtacctgcggatcctccgaccaccttcaaccagtcaaagctgaactctttcatcacgcaatacagcaccggacaggtcagcgtggaaattgaatgggagctgcagaaggaaaacagcaagcgctggaaccccgagatccagtacacctccaactactacaaatctacaagtgtggactttgctgttaatacagaaggcgtgtactctgaaccccgccccattggcacccgttacctcacccgtaatctgtaa

SEQ ID NO: 12496 - DNA, 2217 bp, Artificial Sequence
  source: /note="Description of Artificial Sequence: Synthetic polynucleotide"
atggctgccgatggttatcctccagattggctcgaggacaacctctctgagggcattcgcgagtggtgggcgctgaaacctggagccccgaagcccaaagccaaccagcaaaagcaggacgacggccggggtctggtgcttcctggctacaagtacctcggacccttcaacggactcgacaagggggagcccgtcaacgcggcggacgcggcggccctcgagcacgacaaggcctacgaccagcagctgcaggcgggtgacaatccgtacctgcggtataaccacgccgacgccgagtttcaggagcgtctgcaagaagatacgtcttttgggggcaacctcgggcgagcagtcttccaggccaagaagcgggttctcgaacctctcggtctggttgaggaaggcgctaagacggctcctggaaagaagagaccggtagagccatcaccccagcgttctccagactcctctacgggcatcggcaagaagggccaacagcccgccagaaaaagactcaattttggtcagactggcgactcagagtcagttccagaccctcaacctctcggagaacctccagcagcgccctctggtgtgggacctaatacaatggctgcaggcggtggcgcaccaatggcagacaataacgaaggcgccgacggagtgggtagttcctcgggaaattggcattgcgattccacatggctgggcgacagagtcatcaccaccagcacccgaacctgggccctgcccacctacaacaaccacctctacaagcaaatctccaacgggacatcgggaggagccaccaacgacaacacctacttcggctacagcaccccctgggggtattttgactttaacagattccactgccacttttcaccacgtgactggcagcgactcatcaacaacaactggggattccggcccaagagactcagcttcaagctcttcaacatccaggtcaaggaggtcacgcagaatgaaggcaccaagaccatcgccaataacctcaccagcaccatccaggtgtttacggactcggagtaccagctgccgtacgttctcggctctgcccaccagggctgcctgcctccgttcccggcggacgtgttcacgattccccagtacggctacctaacactcaacaacggtagtcaggccgtgggacgctcctccttctactgcctggaatactttccttcgcagatgctgagaaccggcaacaacttccagtttacttacaccttcgaggacgtgcctttccacagcagctacgcccacagccagagcttggaccggctgatgaatcctctgattgaccagtacctgtactacttgtctcggattcaaacaacaggaggcacggcaaatacgcagactctgggcttcagccaaggtgggcctaatacaatggccaatcaggcaaagaactggctgccaggaccctgttaccgccaacaacgcgtctcaacgacaaccgggcaaaacaacaatagcaactttgcctggactgctgggaccaaataccatctgaatggaagaaattcattggctaatcctggcatcgctatggcaacacacaaagacgacgaggagcgtttttttcccagtaacgggatcctgatttttggcaaacaaaatgctgccagagacaatgcggattacagcgatgtcatgcccaccagcgaggaagaaatcaaaaccactaaccctgtggccacagaggaatacggtatcgtggcagataacttgcagcagcaaaacacggctcctcaaattggaactgtcaacagccagggggccttacccggtatggtctggcagaaccgggacgtgtacctgcagggtcccatctgggccaagattcctcacacggacggcaacttccacccgtctccgctgatgggcggctttggcctgaaacatcctccgcctcagatcctgatcaagaacacgcctgtacctgcggatcctccgaccaccttcaaccagtcaaagctgaactctttcatcacgcaatacagcaccggacaggtcagcgtggaaattgaatgggagctgcagaaggaaaacagcaagcgctggaaccccgagatccagtacacctccaactactacaaatctacaagtgtggactttgctgttaatacagaaggcgtgtactctgaaccccgccccattggcacccgttacctcacccgtaatctgtaa

SEQ ID NO: 12497 - DNA, 2217 bp, Artificial Sequence
  source: /note="Description of Artificial Sequence: Synthetic polynucleotide"
atggctgccgatggttatcttccagattggctcgaggacaacctctctgagggcattcgcgagtggtgggcgctgaaacctggagccccgaagcccaaagccaaccagcaaaagcaggacgacggccggggtctggtgcttcctggctacaagtacctcggacccttcaacggactcgacaagggggagcccgtcaacgcggcggacgcggcggccctcgagcacgacaaggcctacgaccagcagctgcaggcgggtgacaatccgtacctgcggtataaccacgccgacgccgagtttcaggagcgtctgcaagaagatacgtcttttgggggcaacctcgggcgagcagtcttccaggccaagaagcgggttctcgaacctctcggtctggttgaggaaggcgctaagacggctcctggaaagaagagaccggtagagccatcaccccagcgttctccagactcctctacgggcatcggcaagaagggccaacagcccgccagaaaaagactcaattttggtcagactggcgactcagagtcagttccagaccctcaacctctcggagaacctccagcagcgccctctggtgtgggacctaatacaatggctgcaggcggtggcgcaccaatggcagacaataacgaaggcgccgacggagtgggtagttcctcgggaaattggcattgcgattccacatggctgggcgacagagtcatcaccaccagcacccgaacctgggccctgcccacctacaacaaccacctctacaagcaaatctccaacgggacatcgggaggagccaccaacgacaacacctacttcggctacagcaccccctgggggtattttgactttaacagattccactgccacttttcaccacgtgactggcagcgactcatcaacaacaactggggattccggcccaagagactcagcttcaagctcttcaacatccaggtcaaggaggtcacgcagaatgaaggcaccaagaccatcgccaataacctcaccagcaccatccaggtgtttacggactcggagtaccagctgccgtacgttctcggctctgcccaccagggctgcctgcctccgttcccggcggacgtgttcacgattccccagtacggctacctaacactcaacaacggtagtcaggccgtgggacgctcctccttctactgcctggaatactttccttcgcagatgctgagaaccggcaacaacttccagtttacttacaccttcgaggacgtgcctttccacagcagctacgcccacagccagagcttggaccggctgatgaatcctctgattgaccagtacctgtactacttgtctcggattcaaacaacaggaggcacggcaaatacgcagactctgggctccagccaaggtgggcctaatacaatggccaatcaggcaaagaactggctgccaggaccctgttaccgccaacaacgcgtctcaacgacaaccgggcaaaacaacaatagcaactttgcctggactgctgggaccaaataccatctgaatggaagaaattcattggctaatcctggcatcgctatggcaacacacaaagacgacgaggagcgtttttttcccagtaacgggatcctgatttttggcaaacaaaatgctgccagagacaatgcggattacagcgatgtcatgcccaccagcgaggaagaaatcaaaaccactaaccctgtggccacagaggaatacggtatcgtggcagataacttgcagcagcaaaacacggctcctcaaattggaactgtcaacagccagggggccttacccggtatggtctggcagaaccgggacgtgtacctgcagggtcccatctgggccaagattcctcacacggacggcaacttccacccgtctccgctgatgggcggctttggcctgaaacatcctccgcctcagatcctgatcaagaacacgcctgtacctgcggatcctccgaccaccttcaaccagtcaaagctgaactctttcatcacgcaatacagcaccggacaggtcagcgtggaaattgaatgggagctgcagaaggaaaacagcaagcgctggaaccccgagatccagtacacctccaactactacaaatctacaagtgtggactttgctgttaatacagaaggcgtgtactctgaaccccgccccattggcacccgttacctcacccgtaatctgtaa

SEQ ID NO: 12498 - DNA, 2217 bp, Artificial Sequence
  source: /note="Description of Artificial Sequence: Synthetic polynucleotide"
atggctgccgatggttatcttccagattggctcgaggacaacctctctgagggcattcgcgagtggtgggcgctgaaacctggagccccgaagcccaaagccaaccagcaaaagcaggacgacggccggggtctggtgcttcctggctacaagtacctcggacccttcaacggactcgacaagggggagcccgtcaacgcggcggacgcggcggccctcgagcacgacaaggcctacgaccagcagctgcaggcgggtgacaatccgtacctgcggtataaccacgccgacgccgagtttcaggagcgtctgcaagaagatacgtcttttgggggcaacctcgggcgagcagtcttccaggccaagaagcgggttctcgaacctctcggtctggttgaggaaggcgctaagacggctcctggaaagaagagaccggtagagccatcaccccagcgttctccagactcctctacgggcatcggcaagaagggccaacagcccgccagaaaaagactcaattttggtcagactggcgactcagagtcagttccagaccctcaacctctcggagaacctccagcagcgccctctggtgtgggacctaatacaatggctgcaggcggtggcgcaccaatggcagacaataacgaaggcgccgacggagtgggtagttcctcgggaaattggcattgcgattccacatggctgggcgacagagtcatcaccaccagcacccgaacctgggccctgcccacctacaacaaccacctctacaagcaaatctccaacgggacatcgggaggagccaccaacgacaacacctacttcggctacagcaccccctgggggtattttgactttaacagattccactgccacttttcaccacgtgactggcagcgactcatcaacaacaactggggattccggcccaagagactcagcttcaagctcttcaacatccaggtcaaggaggtcacgcagaatgaaggcaccaagaccatcgccaataacctcaccagcaccatccaggtgtttacggactcggagtaccagctgccgtacgttctcggctctgcccaccagggctgcctgcctccgttcccggcggacgtgttcacgattccccagtacggctacctaacactcaacaacggtagtcaggccgtgggacgctcctccttctactgcctggaatactttccttcgcagatgctgagaaccggcaacaacttccagtttacttacaccttcgaggacgtgcctttccacagcagctacgcccacagccagagcttggaccggctgatgaatcctctgattggccagtacctgtactacttgtctcggattcaaacaacaggaggcacggcaaatacgcagactctgggcttcagccaaggtgggcctaatacaatggccaatcaggcaaagaactggctgccaggaccctgttaccgccaacaacgcgtctcaacgacaaccgggcaaaacaacaatagcaactttgcctggactgctgggaccaaataccatctgaatggaagaaattcattggctaatcctggcatcgctatggcaacacacaaagacgacgaggagcgtttttttcccagtaacgggatcctgatttttggcaaacaaaatgctgccagagacaatgcggattacagcgatgtcatgcccaccagcgaggaagaaatcaaaaccactaaccctgtggccacagaggaatacggtatcgtggcagataacttgcagcagcaaaacacggctcctcaaattggaactgtcaacagccagggggccttacccggtatggtctggcagaaccgggacgtgtacctgcagggtcccatctgggccaagattcctcacacggacggcaacttccacccgtctccgctgatgggcggctttggcctgaaacatcctccgcctcagatcctgatcaagaacacgcctgtacctgcggatcctccgaccaccttcaaccagtcaaagctgaactctttcatcacgcaatacagcaccggacaggtcagcgtggaaattgaatgggagctgcagaaggaaaacagcaagcgctggaaccccgagatccagtacacctccaactactacaaatctacaagtgtggactttgctgttaatacagaaggcgtgtactctgaaccccgccccattggcacccgttacctcacccgtaatctgtaa

SEQ ID NO: 12499 - DNA, 2217 bp, Artificial Sequence
  source: /note="Description of Artificial Sequence: Synthetic polynucleotide"
atggctgccgatggttatcttccagattggctcgaggacaacctctctgagggcattcgcgagtggtgggcgctgaaacctggagccccgaagcccaaagccaaccagcaaaagcaggacgacggccggggtctggtgcttcctggctacaagtacctcggacccttcaacggactcgacaagggggagcccgtcaacgcggcggacgcggcggccctcgagcacgacaaggcctacgaccagcagctgcaggcgggtgacaatccgtacctgcggtataaccacgccgacgccgagtttcaggagcgtctgcaagaagatacgtcttttgggggcaacctcgggcgagcagtcttccaggccaagaagcgggttctcgaacctctcggtctggttgaggaaggcgctaagacggctcctggaaagaagagaccggtagagccatcaccccagcgttctccagactcctctacgggcatcggcaagaagggccaacagcccgccagaaaaagactcaattttggtcagactggcgactcagagtcagttccagaccctcaacctctcggagaacctccagcagcgccctctggtgtgggacctaatacaatggctgcaggcggtggcgcaccaatggcagacaataacgaaggcgccgacggagtgggtagttcctcgggaaattggcattgcgattccacatggctgggcgacagagtcatcaccaccagcacccgaacctgggccctgcccacctacaacaaccacctctacaagcaaatctccaacgggacatcgggaggagccaccaacgacaacacctacttcggctacagcaccccctgggggtattttgactttaacagattccactgccacttttcaccacgtgactggcagcgactcatcaacaacaactggggattccggcccaagagacccagcttcaagctcttcaacatccaggtcaaggaggtcacgcagaatgaaggcaccaagaccatcgccaataacctcaccagcaccatccaggtgtttacggactcggagtaccagctgccgtacgttctcggctctgcccaccagggctgcctgcctccgttcccggcggacgtgttcacgattccccagtacggctacctaacactcaacaacggtagtcaggccgtgggacgctcctccttctactgcctggaatactttccttcgcagatgctgagaaccggcaacaacttccagtttacttacaccttcgaggacgtgcctttccacagcagctacgcccacagccagagcttggaccggctgatgaatcctctgattgaccagtacctgtactacttgtctcggattcaaacaacaggaggcacggcaaatacgcagactctgggcttcagccaaggtgggcctaatacaatggccaatcaggcaaagaactggctgccaggaccctgttaccgccaacaacgcgtctcaacgacaaccgggcaaaacaacaatagcaactttgcctggactgctgggaccaaataccatctgaatggaagaaattcattggctaatcctggcatcgctatggcaacacacaaagacgacgaggagcgtttttttcccagtaacgggatcctgatttttggcaaacaaaatgctgccagagacaatgcggattacagcgatgtcatgcccaccagcgaggaagaaatcaaaaccactaaccctgtggccacagaggaatacggtatcgtggcagataacttgcagcagcaaaacacggctcctcaaattggaactgtcaacagccagggggccttacccggtatggtctggcagaaccgggacgtgtacctgcagggtcccatctgggccaagattcctcacacggacggcaacttccacccgtctccgctgatgggcggctttggcctgaaacatcctccgcctcagatcctgatcaagaacacgcctgtacctgcggatcctccgaccaccttcaaccagtcaaagctgaactctttcatcacgcaatacagcaccggacaggtcagcgtggaaattgaatgggagctgcagaaggaaaacagcaagcgctggaaccccgagatccagtacacctccaactactacaaatctacaagtgtggactttgctgttaatacagaaggcgtgtactctgaaccccgccccattggcacccgttacctcacccgtaatctgtaa

SEQ ID NO: 12500 - DNA, 2217 bp, Artificial Sequence
  source: /note="Description of Artificial Sequence: Synthetic polynucleotide"
atggctgccgatggttatcttccagattggctcgaggacaacctctctgagggcattcgcgagtggtgggcgctgaaacctggagccccgaagcccaaagccaaccagcaaaagcaggacgacggccggggtctggtgcttcctggctacaagtacctcggacccttcaacggactcgacaagggggagcccgtcaacgcggcggacgcggcggccctcgagcacgacaaggcctacgaccagcagctgcaggcgggtgacaatccgtacctgcggtataaccacgccgacgccgagtttcaggagcgtctgcaagaagatacgtcttttgggggcaacctcgggcgagcagtcttccaggccaagaagcgggttctcgaacctctcggtctggttgaggaaggcgctaagacggctcctggaaagaagagaccggtagagccatcaccccagcgttctccagactcctctacgggcatcggcaagaagggccaacagcccgccagaaaaagactcaattttggtcagactggcgactcagagtcagttccagaccctcaacctctcggagaacctccagcagcgccctctggtgtgggacctaatacaatggctgcaggcggtggcgcaccaatggcagacaataacgaaggcgccgacggagtgggtagttcctcgggaaattggcattgcgattccacatggctgggcgacagagtcatcaccaccagcacccgaacctgggccctgcccacctacaacaaccacctctacaagcaaatctccaacgggacatcgggaggagccaccaacgacaacacctacttcggctacagcaccccctgggggtattttgactttaacagattccactgccacttttcaccacgtgactggcagcgactcatcaacaacaactggggattccggcccaagagactcagcttcaagctcttcaacatccaggtcaaggaggtcacgcagaatgaaggcaccaagaccatcgccaataacctcaccagcaccatccaggtgtttacggactcggagtaccagctgccgtacgttctcggctctgcccaccagggctgcctgcctccgttcccggcggacgtgttcacgattccccagtacggctacctaacactcaacaacggtagtcaggccgtgggacgctcctccttctactgcctggaatactttccttcgcagatgctgagaaccggcaacaacttccagtttacttacaccttcgaggacgtgcctttccacagcagctacgcccacagccagagcttggaccggctgatgaatcctctgattgaccagtacctgtactacttgtctcggattcaaacaacaggaggcacggcaaatacgcagactctgggcttcagccaaggtgggcctaatacaatggccaatcaggcaaagaactggctgccaggaccctgttaccgccaacaacgcgtctcaacgacaaccgggcaaaacaacaatagcaactttgcctggactgctgggaccaaataccatctgaatggaagaaattcattggctaatcctggcatcgctatggcaacacacaaagacgacggggagcgtttttttcccagtaacgggatcctgatttttggcaaacaaaatgctgccagagacaatgcggattacagcgatgtcatgcccaccagcgaggaagaaatcaaaaccactaaccctgtggccacagaggaatacggtatcgtggcagataacttgcagcagcaaaacacggctcctcaaattggaactgtcaacagccagggggccttacccggtatggtctggcagaaccgggacgtgtacctgcagggtcccatctgggccaagattcctcacacggacggcaacttccacccgtctccgctgatgggcggctttggcctgaaacatcctccgcctcagatcctgatcaagaacacgcctgtacctgcggatcctccgaccaccttcaaccagtcaaagctgaactctttcatcacgcaatacagcaccggacaggtcagcgtggaaattgaatgggagctgcagaaggaaaacagcaagcgctggaaccccgagatccagtacacctccaactactacaaatctacaagtgtggactttgctgttaatacagaaggcgtgtactctgaaccccgccccattggcacccgttacctcacccgtaatctgtaa

SEQ ID NO: 12501 - DNA, 2217 bp, Artificial Sequence
  source: /note="Description of Artificial Sequence: Synthetic polynucleotide"
atggctgccgatggttatcttccagattggctcgaggacaacctctctgagggcattcgcgagtggtgggcgctgaaacctggagccccgaagcccaaagccaaccagcaaaagcaggacgacggccggggtctggtgcttcctggctacaagtacctcggacccttcaacggactcgacaagggggagcccgtcaacgcggcggacgcggcggccctcgagcacgacaaggcctacgaccagcagctgcaggcgggtgacaatccgtacctgcggtataaccacgccgacgccgagtttcaggagcgtctgcaagaagatacgtcttttgggggcaacctcgggcgagcagtcttccaggccaagaagcgggttctcgaacctctcggtctggttgaggaaggcgctaagacggctcctggaaagaagagaccggtagagccatcaccccagcgttctccagactcctctacgggcatcggcaagaagggccaacagcccgccagaaaaagactcaattttggtcagactggcgactcagagtcagttccagaccctcaacctctcggagaacctccagcagcgccctctggtgtgggacctaatacaatggctgcaggcggtggcgcaccaatggcagacaataacgaaggcgccgacggagtgggtagttcctcgggaaattggcattgcgattccacatggctgggcgacagagtcatcaccaccagcacccgaacctgggccccgcccacctacaacaaccacctctacaagcaaatctccaacgggacatcgggaggagccaccaacgacaacacctacttcggctacagcaccccctgggggtattttgactttaacagattccactgccacttttcaccacgtgactggcagcgactcatcaacaacaactggggattccggcccaagagactcagcttcaagctcttcaacatccaggtcaaggaggtcacgcagaatgaaggcaccaagaccatcgccaataacctcaccagcaccatccaggtgtttacggactcggagtaccagctgccgtacgttctcggctctgcccaccagggctgcctgcctccgttcccggcggacgtgttcacgattccccagtacggctacctaacactcaacaacggtagtcaggccgtgggacgctcctccttctactgcctggaatactttccttcgcagatgctgagaaccggcaacaacttccagtttacttacaccttcgaggacgtgcctttccacagcagctacgcccacagccagagcttggaccggctgatgaatcctctgattgaccagtacctgtactacttgtctcggattcaaacaacaggaggcacggcaaatacgcagactctgggcttcagccaaggtgggcctaatacaatggccaatcaggcaaagaactggctgccaggaccctgttaccgccaacaacgcgtctcaacgacaaccgggcaaaacaacaatagcaactttgcctggactgctgggaccaaataccatctgaatggaagaaattcattggctaatcctggcatcgctatggcaacacacaaagacgacgaggagcgtttttttcccagtaacgggatcctgatttttggcaaacaaaatgctgccagagacaatgcggattacagcgatgtcatgcccaccagcgaggaagaaatcaaaaccactaaccctgtggccacagaggaatacggtatcgtggcagataacttgcagcagcaaaacacggctcctcaaattggaactgtcaacagccagggggccttacccggtatggtctggcagaaccgggacgtgtacctgcagggtcccatctgggccaagattcctcacacggacggcaacttccacccgtctccgctgatgggcggctttggcctgaaacatcctccgcctcagatcctgatcaagaacacgcctgtacctgcggatcctccgaccaccttcaaccagtcaaagctgaactctttcatcacgcaatacagcaccggacaggtcagcgtggaaattgaatgggagctgcagaaggaaaacagcaagcgctggaaccccgagatccagtacacctccaactactacaaatctacaagtgtggactttgctgttaatacagaaggcgtgtactctgaaccccgccccattggcacccgttacctcacccgtaatctgtaa

SEQ ID NO: 12502 - DNA, 2217 bp, Artificial Sequence
  source: /note="Description of Artificial Sequence: Synthetic polynucleotide"
atggctgccgatggttatcttccagattggctcgaggacaacctctctgagggcattcgcgagtggtgggcgctgaaacctggagccccgaagcccaaagccaaccagcaaaagcaggacgacggccggggtctggtgcttcctggctacaagtacctcggacccttcaacggactcgacaagggggagcccgtcaacgcggcggacgcggcggccctcgagcacgacaaggcctacgaccagcagctgcaggcgggtgacaatccgtacctgcggtataaccacgccgacgccgagtttcaggagcgtctgcaagaagatacgtcttttgggggcaacctcgggcgagcagtcttccaggccaagaagcgggttctcgaacctctcggtctggttgaggaaggcgctaagacggctcctggaaagaagagaccggtagagccatcaccccagcgttctccagactcctctacgggcatcggcaagaagggccaacagcccgccagaaaaagactcaattttggtcagactggcgactcagagtcagttccagaccctcaacctctcggagaacctccagcagcgccctctggtgtgggacctaatacaatggctgcaggcggtggcgcaccaatggcagacaataacgaaggcgccgacggagtgggtagttcctcgggaaattggcattgcgattccacatggctgggcgacagagtcatcaccaccagcacccgaacctgggccctgcccacctacaacaaccacctctacaagcaaatctccaacgggacatcgggaggagccaccaacgacaacacctacttcggctacagcaccccctgggggtattttgactttaacagattccactgccacttttcaccacgtgactggcagcgactcatcaacaacaactggggattccggcccaagagactcggcttcaagctcttcaacatccaggtcaaggaggtcacgcagaatgaaggcaccaagaccatcgccaataacctcaccagcaccatccaggtgtttacggactcggagtaccagctgccgtacgttctcggctctgcccaccagggctgcctgcctccgttcccggcggacgtgttcacgattccccagtacggctacctaacactcaacaacggtagtcaggccgtgggacgctcctccttctactgcctggaatactttccttcgcagatgctgagaaccggcaacaacttccagtttacttacaccttcgaggacgtgcctttccacagcagctacgcccacagccagagcttggaccggctgatgaatcctctgattgaccagtacctgtactacttgtctcggattcaaacaacaggaggcacggcaaatacgcagactctgggcttcagccaaggtgggcctaatacaatggccaatcaggcaaagaactggctgccaggaccctgttaccgccaacaacgcgtctcaacgacaaccgggcaaaacaacaatagcaactttgcctggactgctgggaccaaataccacctgaatggaagaaattcattggctaatcctggcatcgctatggcaacacacaaagacgacgaggagcgtttttttcccagtaacgggatcctgatttttggcaaacaaaatgctgccagagacaatgcggattacagcgatgtcatgcccaccagcgaggaagaaatcaaaaccactaaccctgtggccacagaggaatacggtatcgtggcagataacttgcagcagcaaaacacggctcctcaaattggaactgtcaacagccagggggccttacccggtatggtctggcagaaccgggacgtgtacctgcagggtcccatctgggccaagattcctcacacggacggcaacttccacccgtctccgctgatgggcggctttggcctgaaacatcctccgcctcagatcctgatcaagaacacgcctgtacctgcggatcctccgaccaccttcaaccagtcaaagctgaactctttcatcacgcaatacagcaccggacaggtcagcgtggaaattgaatgggagctgcagaaggaaaacagcaagcgctggaaccccgagatccagtacacctccaactactacaaatctacaagtgtggactttgctgttaatacagaaggcgtgtactctgaaccccgccccattggcacccgttacctcacccgtaatctgtaa

SEQ ID NO: 12503 - DNA, 2217 bp, Artificial Sequence
  source: /note="Description of Artificial Sequence: Synthetic polynucleotide"
atggctgccgatggttatcttccagattggctcgaggacaacctctctgagggcattcgcgagtggtgggcgctgaaacctggagccccgaagcccaaagccaaccagcaaaagcaggacgacggccggggtctggtgcttcctggctacaagtacctcggacccttcaacggactcgacaagggggagcccgtcaacgcggcggacgcggcggccctcgagcacgacaaggcctacgaccagcagctgcaggcgggtgacaatccgtacctgcggtataaccacgccgacgccgagtttcaggagcgtctgcaagaagatacgtcttttgggggcaacctcgggcgagcagtcttccaggccaagaagcgggttctcgaacctctcggtctggttgaggaaggcgctaagacggctcctggaaagaagagaccggtagagccatcaccccagcgttctccagactcctctacgggcatcggcaagaagggccaacagcccgccagaaaaagactcaattttggtcggactggcgactcagagtcagttccagaccctcaacctctcggagaacctccagcagcgccctctggtgtgggacctaatacaatggctgcaggcggtggcgcaccaatggcagacaataacgaaggcgccgacggagtgggtagttcctcgggaaattggcattgcgattccacatggctgggcgacagagtcatcaccaccagcacccgaacctgggccctgcccacctacaacaaccacctctacaagcaaatctccaacgggacatcgggaggagccaccaacgacaacacctacttcggctacagcaccccctgggggtattttgactttaacagattccactgccacttttcaccacgtgactggcagcgactcatcaacaacaactggggattccggcccaagagactcagcttcaagctcttcaacatccaggtcaaggaggtcacgcagaatgaaggcaccaagaccatcgccaataacctcaccagcaccatccaggtgtttacggactcggagtaccagctgccgtacgttctcggctctgcccaccagggctgcctgcctccgttcccggcggacgtgttcacgattccccagtacggctacctaacactcaacaacggtagtcaggccgtgggacgctcctccttctactgcctggaatactttccttcgcagatgctgagaaccggcaacaacttccagtttacttacaccttcgaggacgtgcctttccacagcagctacgcccacagccagagcttggaccggctgatgaatcctctgattgaccagtacctgtactacttgtctcggattcaaacaacaggaggcacggcaaatacgcagactctgggcttcagccaaggtgggcctaatacaatggccaatcaggcaaagaactggctgccaggaccctgttaccgccaacaacgcgtctcaacgacaaccgggcaaaacaacaatagcaactttgcctggactgctgggaccaaataccatctgaatggaagaaattcattggctaatcctggcatcgctatggcaacacacaaagacgacgaggagcgtttttttcccagtaacgggatcctgatttttggcaaacaaaatgctgccagagacaatgcggattacagcgatgtcatgcccaccagcgaggaagaaatcaaaaccactaaccctgtggccacagaggaatacggtatcgtggcagataacttgcagcagcaaaacacggctcctcaaattggaactgtcaacagccagggggccttacccggtatggtctggcagaaccgggacgtgtacctgcagggtcccatctgggccaagattcctcacacggacggcaacttccacccgtctccgctgatgggcggctttggcctgaaacatcctccgcctcagatcctgatcaagaacacgcctgtacctgcggatcctccgaccaccttcaaccagtcaaagctgaactctttcatcacgcaatacagcaccggacaggtcagcgtggaaattgaatgggagctgcagaaggaaaacagcaagcgctggaaccccgagatccagtacacctccaactactacaaatctacaagtgtggactttgctgttaatacagaaggcgtgtactctgaaccccgccccattggcacccgttacctcacccgtaatctgtaa

SEQ ID NO: 12504 - DNA, 2217 bp, Artificial Sequence
  source: /note="Description of Artificial Sequence: Synthetic polynucleotide"
atggctgccgatggttatcttccagattggctcgaggacaacctctctgagggcattcgcgagtggtgggcgctgaaacctggagccccgaagcccaaagccaaccagcaaaagcaggacgacggccggggtctggtgcttcctggctacaagtacctcggacccttcaacggactcgacaagggggagcccgtcaacgcggcggacgcggcggccctcgagcacgacaaggcctacgaccagcagctgcaggcgggtgacaatccgtacctgcggtataaccacgccgacgccgagtttcaggagcgtctgcaagaagatacgtcttttgggggcaacctcgggcgagcagtcttccaggccaagaagcgggttctcgaacctctcggtctggttgaggaaggcgctaagacggctcctggaaagaagagaccggtagagccatcaccccagcgttctccagactcctctacgggcatcggcaagaagggccaacagcccgccagaaaaagactcaattttggtcagactggcgactcagagtcagttccagaccctcaacctctcggagaacctccagcagcgccctctggtgtgggacctaatacaatggctgcaggcggtggcgcaccaatggcagacaataacgaaggcgccgacggagtgggtagttcctcgggaaattggcattgcgattccacatggctgggcgacagagtcatcaccaccagcacccgaacctgggccctgcccacctacaacaaccacctctacaagcaaatctccaacgggacatcgggaggagccaccaacgacaacacctacttcggctacagcaccccctgggggtattttgactttaacagattccactgccacttttcaccacgtgactggcagcgactcatcaacaacaactggggattccggcccaagagactcagcttcaagctcttcaacatccaggtcaaggaggtcacgcagaatgaaggcaccaagaccatcgccaataacctcaccagcaccatccaggtgtttacggactcggagtaccagctgccgtacgttctcggctctgcccaccagggctgcctgcctccgttcccggcggacgtgttcacgattccccagtacggctacctaacactcaacaacggtagtcaggccgtgggacgctcctccttctactgcctggaatactttccttcgcagatgctgagaaccggcaacaacttccagtttacttacaccttcgaggacgtgcctttccacagcagctacgcccacagccagagcttggaccggctgatgaatcctctgattgaccagtacctgtactacttgtctcggattcaaacaacaggaggcacggcaaatacgcagactctgggcttcagccaaggtgggcctaatacagtggccaatcaggcaaagaactggctgccaggaccctgttaccgccaacaacgcgtctcaacgacaaccgggcaaaacaacaatagcaactttgcctggactgctgggaccaaataccatctgaatggaagaaattcattggctaatcctggcatcgctatggcaacacacaaagacgacgaggagcgtttttttcccagtaacgggatcctgatttttggcaaacaaaatgctgccagagacaatgcggattacagcgatgtcatgcccaccagcgaggaagaaatcaaaaccactaaccctgtggccacagaggaatacggtatcgtggcagataacttgcagcagcaaaacacggctcctcaaattggaactgtcaacagccagggggccttacccggtatggtctggcagaaccgggacgtgtacctgcagggtcccatctgggccaagattcctcacacggacggcaacttccacccgtctccgctgatgggcggctttggcctgaaacatcctccgcctcagatcctgatcaagaacacgcctgtacctgcggatcctccgaccaccttcaaccagtcaaagctgaactctttcatcacgcaatacagcaccggacaggtcagcgtggaaattgaatgggagctgcagaaggaaaacagcaagcgctggaaccccgagatccagtacacctccaactactacaaatctacaagtgtggactttgctgttaatacagaaggcgtgtactctgaaccccgccccattggcacccgttacctcacccgtaatctgtaa

SEQ ID NO: 12505 - DNA, 2217 bp, Artificial Sequence
  source: /note="Description of Artificial Sequence: Synthetic polynucleotide"
atggctgccgatggttatcttccagattggctcgaggacaacctctctgagggcattcgcgagtggtgggcgctgaaacctggagccccgaagcccaaagccaaccagcaaaagcaggacgacggccggggtctggtgcttcctggctacaagtacctcggacccttcaacggactcgacaagggggagcccgtcaacgcggcggacgcggcggccctcgagcacgacaaggcctacgaccagcagctgcaggcgggtgacaatccgtacctgcggtataaccacgccgacgccgagtttcaggagcgtctgcaagaagatacgtcttttgggggcaacctcgggcgagcagtcttccaggccaagaagcgggttctcgaacctctcggtctggttgaggaaggcgctaagacggctcctggaaagaagagaccggtagagccatcaccccagcgttctccagactcctctacgggcatcggcaagaagggccaacagcccgccagaaaaagactcaattttggtcagactggcgactcagagtcagttccagaccctcaacctctcggagaacctccagcagcgccctctggtgtgggacctaatacaatggctgcaggcggtggcgcaccaatggcagacaataacgaaggcgccgacggagtgggtagttcctcgggaaattggcattgcgattccacatggctgggcgacagagtcatcaccaccagcacccgaacctgggccctgcccacctacaacaaccacctctacaagcaaatctccaacgggacatcgggaggagccaccaacgacaacacctacttcggctacagcaccccctgggggtattttgactttaacagattccactgccacttttcaccacgtgactggcagcgactcatcaacaacaactggggattccggcccaagagactcagcttcaagctcttcaacatccaggtcaaggaggtcacgcagaatgaaggcaccaagaccatcgccaataacctcaccagcaccatccaggtgtttacggactcggagtaccagctgccgtacgttctcggctctgcccaccagggctgcctgcctccgttcccggcggacgtgttcacgattccccagtacggctacctaacactcaacaacggtagtcaggccgtgggacgctcctccttctactgcccggaatactttccttcgcagatgctgagaaccggcaacaacttccagtttacttacaccttcgaggacgtgcctttccacagcagctacgcccacagccagagcttggaccggctgatgaatcctctgattgaccagtacctgtactacttgtctcggattcaaacaacaggaggcacggcaaatacgcagactctgggcttcagccaaggtgggcctaatacaatggccaatcaggcaaagaactggctgccaggaccctgttaccgccaacaacgcgtctcaacgacaaccgggcaaaacaacaatagcaactttgcctggactgctgggaccaaataccatctgaatggaagaaattcattggctaatcctggcatcgctatggcaacacacaaagacgacgaggagcgtttttttcccagtaacgggatcctgatttttggcaaacaaaatgctgccagagacaatgcggattacagcgatgtcatgcccaccagcgaggaagaaatcaaaaccactaaccctgtggccacagaggaatacggtatcgtggcagataacttgcagcagcaaaacacggctcctcaaattggaactgtcaacagccagggggccttacccggtatggtctggcagaaccgggacgtgtacctgcagggtcccatctgggccaagattcctcacacggacggcaacttccacccgtctccgctgatgggcggctttggcctgaaacatcctccgcctcagatcctgatcaagaacacgcctgtacctgcggatcctccgaccaccttcaaccagtcaaagctgaactctttcatcacgcaatacagcaccggacaggtcagcgtggaaattgaatgggagctgcagaaggaaaacagcaagcgctggaaccccgagatccagtacacctccaactactacaaatctacaagtgtggactttgctgttaatacagaaggcgtgtactctgaaccccgccccattggcacccgttacctcacccgtaatctgtaa

SEQ ID NO: 12506 - DNA, 2217 bp, Artificial Sequence
  source: /note="Description of Artificial Sequence: Synthetic polynucleotide"
atggctgccgatggttatcttccagattggctcgaggacaacctctctgagggcattcgcgagtggtgggcgctgaaacctggagccccgaagcccaaagccaaccagcaaaagcaggacgacggccggggtctggtgcttcctggctacaagtacctcggacccttcaacggactcgacaagggggagcccgtcaacgcggcggacgcggcggccctcgagcacgacaaggcctacgaccagcagctgcaggcgggtgacaatccgtacctgcggtataaccacgccgacgccgagtttcaggagcgtctgcaagaagatacgtcttttgggggcaacctcgggcgagcagtcttccaggccaagaagcgggttctcgaacctctcggtctggttgaggaaggcgctaagacggctcctggaaagaagagaccggtagagccatcaccccagcgttctccagactcctctacgggcatcggcaagaagggccaacagcccgccagaaaaagactcaattttggtcagactggcgactcagagtcagttccagaccctcaacctctcggagaacctccagcagcgccctctggtgtgggacctaatacaatggctgcaggcggtggcgcaccaatggcagacaataacgaaggcgccgacggagtgggtagttcctcgggaaattggcattgcgattccacatggctgggcgacagagtcatcaccaccagcacccgaacctgggccctgcccacctacaacaaccacctctacaagcaaatctccaacgggacatcgggaggagccaccaacgacaacacctacttcggctacagcaccccctgggggtattttgactttaacagattccactgccacttttcaccacgtgactggcagcgactcatcaacaacaactggggattccggcccaagagactcagcttcaagctcttcaacatccaggtcaaggaggtcacgcagaatgaaggcaccaagaccatcgccaataacctcaccagcaccatccaggtgtttacggactcggagtaccagctgccgtacgttctcggctctgcccaccagggctgcctgcctccgttcccggcggacgtgttcacgattccccagtacggctacctaacactcaacaacggtagtcaggccgtgggacgctcctccttctactgcctggaatactttccttcgcagatgctgagaaccggcaacaacttccagtttacttacaccttcgaggacgtgcctttccacagcagctacgcccacagccagagcttggaccggctgatgaatcctctgattgaccagtacctgtactacttgtctcggattcaaacaacaggaggcacggcaaatacgcagactctgggcttcagccaaggtgggcctaatacaatggccaatcaggcaaagaactggctgccaggaccctgttaccgccaacaacgcgtctcaacgacaaccgggcaaaacaacaatagcaactttgcctggactgctgggaccaaataccatctgaatggaagaaattcattggctaatcctggcatcgctatggcaacacacaaagacgacgaggagcgtttttttcccagtaacgggatcctgatttttggcaaacaaaatgctgccagagacaatgcggattacagcgatgtcatgcccaccagcgaggaagaaatcaaaaccactaaccctgtggccacagaggaatacggtatcgtggcagatagcttgcagcagcaaaacacggctcctcaaattggaactgtcaacagccagggggccttacccggtatggtctggcagaaccgggacgtgtacctgcagggtcccatctgggccaagattcctcacacggacggcaacttccacccgtctccgctgatgggcggctttggcctgaaacatcctccgcctcagatcctgatcaagaacacgcctgtacctgcggatcctccgaccaccttcaaccagtcaaagctgaactctttcatcacgcaatacagcaccggacaggtcagcgtggaaattgaatgggagctgcagaaggaaaacagcaagcgctggaaccccgagatccagtacacctccaactactacaaatctacaagtgtggactttgctgttaatacagaaggcgtgtactctgaaccccgccccattggcacccgttacctcacccgtaatctgtaa

SEQ ID NO: 12507 - DNA, 2217 bp, Artificial Sequence
  source: /note="Description of Artificial Sequence: Synthetic polynucleotide"
atggctgccgatggttatcttccagattggctcgaggacaacctctctgagggcattcgcgagtggtgggcgctgaaacctggagccccgaagcccaaagccaaccagcaaaagcagggcgacggccggggtctggtgcttcctggctacaagtacctcggacccttcaacggactcgacaagggggagcccgtcaacgcggcggacgcggcggccctcgagcacgacaaggcctacgaccagcagctgcaggcgggtgacaatccgtacctgcggtataaccacgccgacgccgagtttcaggagcgtctgcaagaagatacgtcttttgggggcaacctcgggcgagcagtcttccaggccaagaagcgggttctcgaacctctcggtctggttgaggaaggcgctaagacggctcctggaaagaagagaccggtagagccatcaccccagcgttctccagactcctctacgggcatcggcaagaagggccaacagcccgccagaaaaagactcaattttggtcagactggcgactcagagtcagttccagaccctcaacctctcggagaacctccagcagcgccctctggtgtgggacctaatacaatggctgcaggcggtggcgcaccaatggcagacaataacgaaggcgccgacggagtgggtagttcctcgggaaattggcattgcgattccacatggctgggcgacagagtcatcaccaccagcacccgaacctgggccctgcccacctacaacaaccacctctacaagcaaatctccaacgggacatcgggaggagccaccaacgacaacacctacttcggctacagcaccccctgggggtattttgactttaacagattccactgccacttttcaccacgtgactggcagcgactcatcaacaacaactggggattccggcccaagagactcagcttcaagctcttcaacatccaggtcaaggaggtcacgcagaatgaaggcaccaagaccatcgccaataacctcaccagcaccatccaggtgtttacggactcggagtaccagctgccgtacgttctcggctctgcccaccagggctgcctgcctccgttcccggcggacgtgttcacgattccccagtacggctacctaacactcaacaacggtagtcaggccgtgggacgctcctccttctactgcctggaatactttccttcgcagatgctgagaaccggcaacaacttccagtttacttacaccttcgaggacgtgcctttccacagcagctacgcccacagccagagcttggaccggctgatgaatcctctgattgaccagtacctgtactacttgtctcggattcaaacaacaggaggcacggcaaatacgcagactctgggcttcagccaaggtgggcctaatacaatggccaatcaggcaaagaactggctgccaggaccctgttaccgccaacaacgcgtctcaacgacaaccgggcaaaacaacaatagcaactttgcctggactgctgggaccaaataccatctgaatggaagaaattcattggctaatcctggcatcgctatggcaacacacaaagacgacgaggagcgtttttttcccagtaacgggatcctgatttttggcaaacaaaatgctgccagagacaatgcggattacagcgatgtcatgcccaccagcgaggaagaaatcaaaaccactaaccctgtggccacagaggaatacggtatcgtggcagataacttgcagcagcaaaacacggctcctcaaattggaactgtcaacagccagggggccttacccggtatggtctggcagaaccgggacgtgtacctgcagggtcccatctgggccaagattcctcacacggacggcaacttccacccgtctccgctgatgggcggctttggcctgaaacatcctccgcctcagatcctgatcaagaacacgcctgtacctgcggatcctccgaccaccttcaaccagtcaaagctgaactctttcatcacgcaatacagcaccggacaggtcagcgtggaaattgaatgggagctgcagaaggaaaacagcaagcgctggaaccccgagatccagtacacctccaactactacaaatctacaagtgtggactttgctgttaatacagaaggcgtgtactctgaaccccgccccattggcacccgttacctcacccgtaatctgtaa

SEQ ID NO: 12508 - DNA, 2217 bp, Artificial Sequence
  source: /note="Description of Artificial Sequence: Synthetic polynucleotide"
atggctgccgatggttatcttccagattggctcgaggacaacctctctgagggcattcgcgagtggtgggcgctgaaacctggagccccgaagcccaaagccaaccagcaaaagcaggacgacggccggggtctggtgcttcctggctacaagtacctcggacccttcaacggactcgacaagggggagcccgtcaacgcggcggacgcggcggccctcgagcacgacaaggcctacgaccagcagctgcaggcgggtgacaatccgtacctgcggtataaccacgccgacgccgagtttcaggagcgtctgcaagaagatacgtcttttgggggcaacctcgggcgagcagtcttccaggccaagaagcgggttctcgaacctctcggtctggttgaggaaggcgctaagacggctcctggaaagaagagaccggtagagccatcaccccagcgttctccagactcctctacgggcatcggcaagaagggccaacagcccgccagaaaaagactcaattttggtcagactggcgactcagagtcagttccagaccctcaacctctcggagaacctccagcagcgccctctggtgtgggacctaatacaatggctgcaggcggtggcgcaccaatggcagacaataacgaaggcgccgacggagtgggtagttcctcgggaaattggcattgcgattccacatggctgggcgacagagtcatcaccaccagcacccgaacctgggccctgcccacctacaacaaccacctctacaagcaaatctccaacgggacatcgggaggagccaccaacgacaacacctacttcggctacagcaccccctgggggtattttgactttaacagattccactgccacttttcaccacgtgactggcagcgactcatcaacaacaactggggattccggcccaagagactcagctccaagctcttcaacatccaggtcaaggaggtcacgcagaatgaaggcaccaagaccatcgccaataacctcaccagcaccatccaggtgtttacggactcggagtaccagctgccgtacgttctcggctctgcccaccagggctgcctgcctccgttcccggcggacgtgttcacgattccccagtacggctacctaacactcaacaacggtagtcaggccgtgggacgctcctccttctactgcctggaatactttccttcgcagatgctgagaaccggcaacaacttccagtttacttacaccttcgaggacgtgcctttccacagcagctacgcccacagccagagcttggaccggctgatgaatcctctgattgaccagtacctgtactacttgtctcggattcaaacaacaggaggcacggcaaatacgcagactctgggcttcagccaaggtgggcctaatacaatggccaatcaggcaaagaactggctgccaggaccctgttaccgccaacaacgcgtctcaacgacaaccgggcaaaacaacaatagcaactttgcctggactgctgggaccaaataccatctgaatggaagaaattcattggctaatcctggcatcgctatggcaacacacaaagacgacgaggagcgtttttttcccagtaacgggatcctgatttttggcaaacaaaatgctgccagagacaatgcggattacagcgatgtcatgcccaccagcgaggaagaaatcaaaaccactaaccctgtggccacagaggaatacggtatcgtggcagataacttgcagcagcaaaacacggctcctcaaattggaactgtcaacagccagggggccttacccggtatggtctggcagaaccgggacgtgtacctgcagggtcccatctgggccaagattcctcacacggacggcaacttccacccgtctccgctgatgggcggctttggcctgaaacatcctccgcctcagatcctgatcaagaacacgcctgtacctgcggatcctccgaccaccttcaaccagtcaaagctgaactctttcatcacgcaatacagcaccggacaggtcagcgtggaaattgaatgggagctgcagaaggaaaacagcaagcgctggaaccccgagatccagtacacctccaactactacaaatctacaagtgtggactttgctgttaatacagaaggcgtgtactctgaaccccgccccattggcacccgttacctcacccgtaatctgtaa

SEQ ID NO: 12509 - DNA, 2217 bp, Artificial Sequence
  source: /note="Description of Artificial Sequence: Synthetic polynucleotide"
atggctgccgatggttatcttccagattggctcgaggacaacctctctgagggcattcgcgagtggtgggcgctgaaacctggagccccgaagcccaaagccaaccagcaaaagcaggacgacggccggggtctggtgcttcctggctacaagtacctcggacccttcaacggactcgacaagggggagcccgtcaacgcggcggacgcggcggccctcgagcacgacaaggcctacgaccagcagctgcaggcgggtgacaatccgtacctgcggtataaccacgccgacgccgagtttcaggagcgtctgcaagaagatacgtcttttgggggcaacctcgggcgagcagtcttccaggccaagaagcgggttctcgaacctctcggtctggttgaggaaggcgctaagacggctcctggaaagaagagaccggtagagccatcaccccagcgttctccagactcctctacgggcatcggcaagaagggccaacagcccgccagaaaaagactcaattttggtcagactggcgactcagagtcagttccagaccctcaacctctcggagaacctccagcagcgccctctggtgtgggacctaatacaatggctgcaggcggtggcgcaccaatggcagacaataacgaaggcgccgacggagtgggtagttcctcgggaaattggcattgcgattccacatggctgggcgacagagtcatcaccaccagcacccgaacctgggccctgcccacctacaacaaccacctctacaagcaaatctccaacgggacatcgggaggagccaccaacgacaacacctacttcggctacagcaccccctgggggtattttgactttaacagattccactgccacttttcaccacgtgactggcagcgactcatcaacaacaactggggattccggcccaagagactcagcttcaagctcttcaacatccaggtcaaggaggtcacgcagaatgaaggcaccaagaccatcgccaataacctcaccagcaccatccaggtgtttacggactcggagtaccagctgccgtacgttctcggctctgcccaccagggctgcctgcctccgttcccggcggacgtgttcacgattccccagtacggctacctaacactcaacaacggtagtcaggccgtgggacgctcctccttctactgcctggaatactttccttcgcagatgctgagaaccggcaacaacttccagtttacttacgccttcgaggacgtgcctttccacagcagctacgcccacagccagagcttggaccggctgatgaatcctctgattgaccagtacctgtactacttgtctcggattcaaacaacaggaggcacggcaaatacgcagactctgggcttcagccaaggtgggcctaatacaatggccaatcaggcaaagaactggctgccaggaccctgttaccgccaacaacgcgtctcaacgacaaccgggcaaaacaacaatagcaactttgcctggactgctgggaccaaataccatctgaatggaagaaattcattggctaatcctggcatcgctatggcaacacacaaagacgacgaggagcgtttttttcccagtaacgggatcctgatttttggcaaacaaaatgctgccagagacaatgcggattacagcgatgtcatgcccaccagcgaggaagaaatcaaaaccactaaccctgtggccacagaggaatacggtatcgtggcagataacttgcagcagcaaaacacggctcctcaaattggaactgtcaacagccagggggccttacccggtatggtctggcagaaccgggacgtgtacctgcagggtcccatctgggccaagattcctcacacggacggcaacttccacccgtctccgctgatgggcggctttggcctgaaacatcctccgcctcagatcctgatcaagaacacgcctgtacctgcggatcctccgaccaccttcaaccagtcaaagctgaactctttcatcacgcaatacagcaccggacaggtcagcgtggaaattgaatgggagctgcagaaggaaaacagcaagcgctggaaccccgagatccagtacacctccaactactacaaatctacaagtgtggactttgctgttaatacagaaggcgtgtactctgaaccccgccccattggcacccgttacctcacccgtaatctgtaa

SEQ ID NO: 12510 - DNA, 2217 bp, Artificial Sequence
  source: /note="Description of Artificial Sequence: Synthetic polynucleotide"
atggctgccgatggttatcttccagattggctcgaggacaacctctctgagggcattcgcgagtggtgggcgctgaaacctggagccccgaagcccaaagccaaccagcaaaagcaggacgacggccggggtctggtgcttcctggctacaagtacctcggacccttcaacggactcgacaagggggagcccgtcaacgcggcggacgcggcggccctcgagcacgacaaggcctacgaccagcagctgcaggcgggtgacaatccgtacctgcggtataaccacgccgacgccgagtttcaggagcgtctgcaagaagatacgtcttttgggggcaacctcgggcgagcagtcttccaggccaagaagcgggttctcgaacctctcggtctggttgaggaaggcgctaagacggctcctggaaagaagagaccggtagagccatcaccccagcgttctccagactcctctacgggcatcggcaagaagggccaacagcccgccagaaaaagactcaattttggtcagactggcgactcagagtcagttccagaccctcaacctctcggagaacctccagcagcgccctctggtgtgggacctaatacaatggctgcaggcggtggcgcaccaatggcagacaataacgaaggcgccgacggagtgggtagttcctcgggaaattggcattgcgattccacatggctgggcgacagagtcatcaccaccagcacccgaacctgggccctgcccgcctacaacaaccacctctacaagcaaatctccaacgggacatcgggaggagccaccaacgacaacacctacttcggctacagcaccccctgggggtattttgactttaacagattccactgccacttttcaccacgtgactggcagcgactcatcaacaacaactggggattccggcccaagagactcagcttcaagctcttcaacatccaggtcaaggaggtcacgcagaatgaaggcaccaagaccatcgccaataacctcaccagcaccatccaggtgtttacggactcggagtaccagctgccgtacgttctcggctctgcccaccagggctgcctgcctccgttcccggcggacgtgttcacgattccccagtacggctacctaacactcaacaacggtagtcaggccgtgggacgctcctccttctactgcctggaatactttccttcgcagatgctgagaaccggcaacaacttccagtttacttacaccttcgaggacgtgcctttccacagcagctacgcccacagccagagcttggaccggctgatgaatcctctgattgaccagtacctgtactacttgtctcggattcaaacaacaggaggcacggcaaatacgcagactctgggcttcagccaaggtgggcctaatacaatggccaatcaggcaaagaactggctgccaggaccctgttaccgccaacaacgcgtctcaacgacaaccgggcaaaacaacaatagcaactttgcctggactgctgggaccaaataccatctgaatggaagaaattcattggctaatcctggcatcgctatggcaacacacaaagacgacgaggagcgtttttttcccagtaacgggatcctgatttttggcaaacaaaatgctgccagagacaatgcggattacagcgatgtcatgcccaccagcgaggaagaaatcaaaaccactaaccctgtggccacagaggaatacggtatcgtggcagataacttgcagcagcaaaacacggctcctcaaattggaactgtcaacagccagggggccttacccggtatggtctggcagaaccgggacgtgtacctgcagggtcccatctgggccaagattcctcacacggacggcaacttccacccgtctccgctgatgggcggctttggcctgaaacatcctccgcctcagatcctgatcaagaacacgcctgtacctgcggatcctccgaccaccttcaaccagtcaaagctgaactctttcatcacgcaatacagcaccggacaggtcagcgtggaaattgaatgggagctgcagaaggaaaacagcaagcgctggaaccccgagatccagtacacctccaactactacaaatctacaagtgtggactttgctgttaatacagaaggcgtgtactctgaaccccgccccattggcacccgttacctcacccgtaatctgtaa

SEQ ID NO: 12511 - DNA, 2217 bp, Artificial Sequence
  source: /note="Description of Artificial Sequence: Synthetic polynucleotide"
atggctgccgatggttatcttccagattggctcgaggacaacctctctgagggcattcgcgagtggtgggcgctgaaacctggagccccgaagcccaaagccaaccagcaaaagcaggacgacggccggggtctggtgcttcctggctacaagtacctcggacccttcaacggactcgacaagggggagcccgtcaacgcggcggacgcggcggccctcgagcacgacaaggcctacgaccagcagctgcaggcgggtgacaatccgtacctgcggtataaccacgccgacgccgagtttcaggagcgtctgcaagaagatacgtcttttgggggcagcctcgggcgagcagtcttccaggccaagaagcgggttctcgaacctctcggtctggttgaggaaggcgctaagacggctcctggaaagaagagaccggtagagccatcaccccagcgttctccagactcctctacgggcatcggcaagaagggccaacagcccgccagaaaaagactcaattttggtcagactggcgactcagagtcagttccagaccctcaacctctcggagaacctccagcagcgccctctggtgtgggacctaatacaatggctgcaggcggtggcgcaccaatggcagacaataacgaaggcgccgacggagtgggtagttcctcgggaaattggcattgcgattccacatggctgggcgacagagtcatcaccaccagcacccgaacctgggccctgcccacctacaacaaccacctctacaagcaaatctccaacgggacatcgggaggagccaccaacgacaacacctacttcggctacagcaccccctgggggtattttgactttaacagattccactgccacttttcaccacgtgactggcagcgactcatcaacaacaactggggattccggcccaagagactcagcttcaagctcttcaacatccaggtcaaggaggtcacgcagaatgaaggcaccaagaccatcgccaataacctcaccagcaccatccaggtgtttacggactcggagtaccagctgccgtacgttctcggctctgcccaccagggctgcctgcctccgttcccggcggacgtgttcacgattccccagtacggctacctaacactcaacaacggtagtcaggccgtgggacgctcctccttctactgcctggaatactttccttcgcagatgctgagaaccggcaacaacttccagtttacttacaccttcgaggacgtgcctttccacagcagctacgcccacagccagagcttggaccggctgatgaatcctctgattgaccagtacctgtactacttgtctcggattcaaacaacaggaggcacggcaaatacgcagactctgggcttcagccaaggtgggcctaatacaatggccaatcaggcaaagaactggctgccaggaccctgttaccgccaacaacgcgtctcaacgacaaccgggcaaaacaacaatagcaactttgcctggactgctgggaccaaataccatctgaatggaagaaattcattggctaatcctggcatcgctatggcaacacacaaagacgacgaggagcgtttttttcccagtaacgggatcctgatttttggcaaacaaaatgctgccagagacaatgcggattacagcgatgtcatgcccaccagcgaggaagaaatcaaaaccactaaccctgtggccacagaggaatacggtatcgtggcagataacttgcagcagcaaaacacggctcctcaaattggaactgtcaacagccagggggccttacccggtatggtctggcagaaccgggacgtgtacctgcagggtcccatctgggccaagattcctcacacggacggcaacttccacccgtctccgctgatgggcggctttggcctgaaacatcctccgcctcagatcctgatcaagaacacgcctgtacctgcggatcctccgaccaccttcaaccagtcaaagctgaactctttcatcacgcaatacagcaccggacaggtcagcgtggaaattgaatgggagctgcagaaggaaaacagcaagcgctggaaccccgagatccagtacacctccaactactacaaatctacaagtgtggactttgctgttaatacagaaggcgtgtactctgaaccccgccccattggcacccgttacctcacccgtaatctgtaa

SEQ ID NO: 12512 - DNA, 2217 bp, Artificial Sequence
  source: /note="Description of Artificial Sequence: Synthetic polynucleotide"
atggctgccgatggttatcttccagattggctcgaggacaacctctctgagggcattcgcgagtggtgggcgctgaaacctggagccccgaagcccaaagccaaccagcaaaagcaggacgacggccggggtctggtgcttcctggctacaagtacctcggacccttcaacggactcgacaagggggagcccgtcaacgcggcggacgcggcggccctcgagcacgacaaggcctacgaccagcagctgcaggcgggtgacaatccgtacctgcggtataaccacgccgacgccgagtttcaggagcgtctgcaagaagatacgtcttttgggggcaacctcgggcgagcagtcttccaggccaagaagcgggttctcgaacctctcggtctggttgaggaaggcgctaagacggctcctggaaagaagagaccggtagagccatcaccccagcgttctccagactcctctacgggcatcggcaagaagggccaacagcccgccagaaaaagactcaattttggtcagactggcgactcagagtcagttccagaccctcaacctctcggagaacctccagcagcgccctctggtgtgggacctaatacaatggctgcaggcggtggcgcaccaatggcagacaataacgaaggcgccgacggagtgggtagttcctcgggaaattggcattgcgattccacatggctgggcgacagagtcatcaccaccagcacccgaacctgggccctgcccacctacaacaaccacctctacaagcaaatctccaacgggacatcgggaggagccaccaacgacaacacctacttcggctacagcaccccctgggggtattttgactttaacagattccactgccacttttcaccacgtgactggcagcgactcatcaacaacaactggggattccggcccaagagactcagcttcaagctcttcaacatccaggtcaaggaggtcacgcagaatgaaggcaccaagaccatcgccaataacctcaccagcaccatccaggtgtttacggactcggagtaccagctgccgtacgttctcggctctgcccaccagggctgcctgcctccgttcccggcggacgtgttcacgattccccagtacggctacctaacactcaacaacggtagtcaggccgtgggacgctcctccttctactgcctggaatactttccttcgcagatgctgagaaccggcaacaacttccagtttacttacaccttcgaggacgtgcctttccacagcagctacgcccacagccagagcttggaccggctgatgaatcctctgattgaccagtacctgtactacttgtctcggattcaaacaacaggaggcacggcaaatacgcagactctgggcttcagccaaggtgggcctaatacaatggccaatcaggcaacgaactggctgccaggaccctgttaccgccaacaacgcgtctcaacgacaaccgggcaaaacaacaatagcaactttgcctggactgctgggaccaaataccatctgaatggaagaaattcattggctaatcctggcatcgctatggcaacacacaaagacgacgaggagcgtttttttcccagtaacgggatcctgatttttggcaaacaaaatgctgccagagacaatgcggattacagcgatgtcatgcccaccagcgaggaagaaatcaaaaccactaaccctgtggccacagaggaatacggtatcgtggcagataacttgcagcagcaaaacacggctcctcaaattggaactgtcaacagccagggggccttacccggtatggtctggcagaaccgggacgtgtacctgcagggtcccatctgggccaagattcctcacacggacggcaacttccacccgtctccgctgatgggcggctttggcctgaaacatcctccgcctcagatcctgatcaagaacacgcctgtacctgcggatcctccgaccaccttcaaccagtcaaagctgaactctttcatcacgcaatacagcaccggacaggtcagcgtggaaattgaatgggagctgcagaaggaaaacagcaagcgctggaaccccgagatccagtacacctccaactactacaaatctacaagtgtggactttgctgttaatacagaaggcgtgtactctgaaccccgccccattggcacccgttacctcacccgtaatctgtaa

SEQ ID NO: 12513 - DNA, 2217 bp, Artificial Sequence
  source: /note="Description of Artificial Sequence: Synthetic polynucleotide"
atggctgccgatggttatcttccagattggctcgaggacaacctctctgagggcattcgcgagtggtgggcgctgaaacctggagccccgaagcccaaagccaaccagcaaaagcaggacgacggccggggtctggtgcttcctggctacaagtacctcggacccttcaacggactcgacaagggggagcccgtcaacgcggcggacgcggcggccctcgagcacgacaaggcctacggccagcagctgcaggcgggtgacaatccgtacctgcggtataaccacgccgacgccgagtttcaggagcgtctgcaagaagatacgtcttttgggggcaacctcgggcgagcagtcttccaggccaagaagcgggttctcgaacctctcggtctggttgaggaaggcgctaagacggctcctggaaagaagagaccggtagagccatcaccccagcgttctccagactcctctacgggcatcggcaagaagggccaacagcccgccagaaaaagactcaattttggtcagactggcgactcagagtcagttccagaccctcaacctctcggagaacctccagcagcgccctctggtgtgggacctaatacaatggctgcaggcggtggcgcaccaatggcagacaataacgaaggcgccgacggagtgggtagttcctcgggaaattggcattgcgattccacatggctgggcgacagagtcatcaccaccagcacccgaacctgggccctgcccacctacaacaaccacctctacaagcaaatctccaacgggacatcgggaggagccaccaacgacaacacctacttcggctacagcaccccctgggggtattttgactttaacagattccactgccacttttcaccacgtgactggcagcgactcatcaacaacaactggggattccggcccaagagactcagcttcaagctcttcaacatccaggtcaaggaggtcacgcagaatgaaggcaccaagaccatcgccaataacctcaccagcaccatccaggtgtttacggactcggagtaccagctgccgtacgttctcggctctgcccaccagggctgcctgcctccgttcccggcggacgtgttcacgattccccagtacggctacctaacactcaacaacggtagtcaggccgtgggacgctcctccttctactgcctggaatactttccttcgcagatgctgagaaccggcaacaacttccagtttacttacaccttcgaggacgtgcctttccacagcagctacgcccacagccagagcttggaccggctgatgaatcctctgattgaccagtacctgtactacttgtctcggattcaaacaacaggaggcacggcaaatacgcagactctgggcttcagccaaggtgggcctaatacaatggccaatcaggcaaagaactggctgccaggaccctgttaccgccaacaacgcgtctcaacgacaaccgggcaaaacaacaatagcaactttgcctggactgctgggaccaaataccatctgaatggaagaaattcattggctaatcctggcatcgctatggcaacacacaaagacgacgaggagcgtttttttcccagtaacgggatcctgatttttggcaaacaaaatgctgccagagacaatgcggattacagcgatgtcatgcccaccagcgaggaagaaatcaaaaccactaaccctgtggccacagaggaatacggtatcgtggcagataacttgcagcagcaaaacacggctcctcaaattggaactgtcaacagccagggggccttacccggtatggtctggcagaaccgggacgtgtacctgcagggtcccatctgggccaagattcctcacacggacggcaacttccacccgtctccgctgatgggcggctttggcctgaaacatcctccgcctcagatcctgatcaagaacacgcctgtacctgcggatcctccgaccaccttcaaccagtcaaagctgaactctttcatcacgcaatacagcaccggacaggtcagcgtggaaattgaatgggagctgcagaaggaaaacagcaagcgctggaaccccgagatccagtacacctccaactactacaaatctacaagtgtggactttgctgttaatacagaaggcgtgtactctgaaccccgccccattggcacccgttacctcacccgtaatctgtaa

SEQ ID NO: 12514 - DNA, 2217 bp, Artificial Sequence
  source: /note="Description of Artificial Sequence: Synthetic polynucleotide"
atggctgccgatggttatcttccagattggctcgaggacaacctctctgagggcattcgcgagtggtgggcgctgaaacctggagccccgaagcccaaagccaaccagcaaaagcaggacgacggccggggtctggtgcttcctggctacaagtacctcggacccttcaacggactcgacaagggggagcccgtcaacgcggcggacgcggcggccctcgagcacgacaaggcctacgaccagcagctgcaggcgggtgacaatccgtacctgcggtataaccacgccgacgccgagtttcaggagcgtctgcaagaagatacgtcttttgggggcaacctcgggcgagcagtcttccaggccaagaagcgggttctcgaacctctcggtctggttgaggaaggcgctaagacggctcctggaaagaagagaccggtagagccatcaccccagcgttctccagactcctctacgggcatcggcaagaagggccaacagcccgccagaaaaagactcaattttggtcagactggcgactcagagtcagttccagaccctcaacctctcggagaacctccagcagcgccctctggtgtgggacctaatacaatggctgcaggcggtggcgcaccaatggcagacaataacgaaggcgccgacggagtgggtagttcctcgggaaattggcattgcgattccacatggctgggcgacagagtcatcaccaccagcacccgaacctgggccctgcccacctacaacaaccacctctacaagcaaatctccaacgggacatcgggaggagccaccaacgacaacacctacttcggctacagcaccccctgggggtattttgactttaacagattccactgccacttttcaccacgtgactggcagcgactcatcaacaacaactggggattccggcccaagagactcagcttcaagctcctcaacatccaggtcaaggaggtcacgcagaatgaaggcaccaagaccatcgccaataacctcaccagcaccatccaggtgtttacggactcggagtaccagctgccgtacgttctcggctctgcccaccagggctgcctgcctccgttcccggcggacgtgttcacgattccccagtacggctacctaacactcaacaacggtagtcaggccgtgggacgctcctccttctactgcctggaatactttccttcgcagatgctgagaaccggcaacaacttccagtttacttacaccttcgaggacgtgcctttccacagcagctacgcccacagccagagcttggaccggctgatgaatcctctgattgaccagtacctgtactacttgtctcggattcaaacaacaggaggcacggcaaatacgcagactctgggcttcagccaaggtgggcctaatacaatggccaatcaggcaaagaactggctgccaggaccctgttaccgccaacaacgcgtctcaacgacaaccgggcaaaacaacaatagcaactttgcctggactgctgggaccaaataccatctgaatggaagaaattcattggctaatcctggcatcgctatggcaacacacaaagacgacgaggagcgtttttttcccagtaacgggatcctgatttttggcaaacaaaatgctgccagagacaatgcggattacagcgatgtcatgcccaccagcgaggaagaaatcaaaaccactaaccctgtggccacagaggaatacggtatcgtggcagataacttgcagcagcaaaacacggctcctcaaattggaactgtcaacagccagggggccttacccggtatggtctggcagaaccgggacgtgtacctgcagggtcccatctgggccaagattcctcacacggacggcaacttccacccgtctccgctgatgggcggctttggcctgaaacatcctccgcctcagatcctgatcaagaacacgcctgtacctgcggatcctccgaccaccttcaaccagtcaaagctgaactctttcatcacgcaatacagcaccggacaggtcagcgtggaaattgaatgggagctgcagaaggaaaacagcaagcgctggaaccccgagatccagtacacctccaactactacaaatctacaagtgtggactttgctgttaatacagaaggcgtgtactctgaaccccgccccattggcacccgttacctcacccgtaatctgtaa

SEQ ID NO: 12515 - DNA, 2217 bp, Artificial Sequence
  source: /note="Description of Artificial Sequence: Synthetic polynucleotide"
atggctgccgatggttatcttccagattggctcgaggacaacctctctgagggcattcgcgagtggtgggcgctgaaacctggagccccgaagcccaaagccaaccagcaaaagcaggacgacggccggggtctggtgcttcctggctacaagtacctcggacccttcaacggactcgacaagggggagcccgtcaacgcggcggacgcggcggccctcgagcacgacaaggcctacgaccagcagctgcaggcgggtgacaatccgtacctgcggtataaccacgccgacgccgagtttcaggagcgtctgcaagaagatacgtcttttgggggcaacctcgggcgagcagtcttccaggccaagaagcgggttctcgaacctctcggtctggttgaggaaggcgctaagacggctcctggaaagaagagaccggtagagccatcaccccagcgttctccagactcctctacgggcatcggcaagaagggccaacagcccgccagaaaaagactcaattttggtcagactggcgactcagagtcagttccagaccctcaacctctcggagaacctccagcagcgccctctggtgtgggacctaatacaatggctgcaggcggtggcgcaccaatggcagacaataacgaaggcgccgacggagtgggtagttcctcgggaaattggcattgcgattccacatggctgggcgacagagtcatcaccaccagcacccgaacctgggccctgcccacctacaacaaccacctctacaagcaaatctccaacgggacatcgggaggagccaccaacgacaacacctacttcggctacagcaccccctgggggtattttgactttaacagattccactgccacttttcaccacgtgactggcagcgactcatcaacaacaactggggattccggcccaagagactcagcttcaagctcttcaacatccaggtcaaggaggtcacgcagaatgaaggcaccaagaccatcgccaataacctcaccagcaccatccaggtgtttacggactcggagtaccagctgccgtacgttctcggctctgcccaccagggctgcctgcctccgttcccggcggacgtgttcacgattccccagtacggctacctaacactcaacaacggtagtcaggccgtgggacgctcctccttctactgcctggaatactttccttcgcagatgctgagaaccggcaacaacttccagtttacttacaccttcgaggacgtgcctttccacagcagctacgcccacagccagagcttggaccggctgatgaatcctctgattgaccagtacctgtactacttgtctcggattcaaacaacaggaggcacggcaaatacgcagactctgggcttcagccaaggtgggcctaatacaatggccaatcaggcaaagaactggctgccaggaccctgttaccgccaacaacgcgtctcaacgacaaccgggcaaaacaacaatagcaactttgcctggactgctgggaccaaataccatctgaatggaagaaattcattggctaatcctggcatcgctatggcaacacacaaagacgacgaggagcgtttttttcccagtaacgggatcctgatttttggcaaacaaaatgctgccagagacaatgcggattacagcgatgtcgtgcccaccagcgaggaagaaatcaaaaccactaaccctgtggccacagaggaatacggtatcgtggcagataacttgcagcagcaaaacacggctcctcaaattggaactgtcaacagccagggggccttacccggtatggtctggcagaaccgggacgtgtacctgcagggtcccatctgggccaagattcctcacacggacggcaacttccacccgtctccgctgatgggcggctttggcctgaaacatcctccgcctcagatcctgatcaagaacacgcctgtacctgcggatcctccgaccaccttcaaccagtcaaagctgaactctttcatcacgcaatacagcaccggacaggtcagcgtggaaattgaatgggagctgcagaaggaaaacagcaagcgctggaaccccgagatccagtacacctccaactactacaaatctacaagtgtggactttgctgttaatacagaaggcgtgtactctgaaccccgccccattggcacccgttacctcacccgtaatctgtaa

SEQ ID NO: 12516 - DNA, 2217 bp, Artificial Sequence
  source: /note="Description of Artificial Sequence: Synthetic polynucleotide"
atggctgccgatggttatcttccagattggctcgaggacaacctctctgagggcattcgcgagtggtgggcgctgaaacctggagccccgaagcccaaagccaaccagcaaaagcaggacgacggccggggtctggtgcttcctggctacaagtacctcggacccttcaacggactcgacaagggggagcccgtcaacgcggcggacgcggcggccctcgagcacgacaaggcctacgaccagcagctgcaggcgggtgacaatccgtacctgcggtataaccacgccgacgccgagtttcaggagcgtctgcaagaagatacgtcttttgggggcaacctcgggcgagcagtcttccaggccaagaagcgggttctcgaacctctcggtctggttgaggaaggcgctaagacggctcctggaaagaagagaccggtagagccatcaccccagcgttctccagactcctctacgggcatcggcaagaagggccgacagcccgccagaaaaagactcaattttggtcagactggcgactcagagtcagttccagaccctcaacctctcggagaacctccagcagcgccctctggtgtgggacctaatacaatggctgcaggcggtggcgcaccaatggcagacaataacgaaggcgccgacggagtgggtagttcctcgggaaattggcattgcgattccacatggctgggcgacagagtcatcaccaccagcacccgaacctgggccctgcccacctacaacaaccacctctacaagcaaatctccaacgggacatcgggaggagccaccaacgacaacacctacttcggctacagcaccccctgggggtattttgactttaacagattccactgccacttttcaccacgtgactggcagcgactcatcaacaacaactggggattccggcccaagagactcagcttcaagctcttcaacatccaggtcaaggaggtcacgcagaatgaaggcaccaagaccatcgccaataacctcaccagcaccatccaggtgtttacggactcggagtaccagctgccgtacgttctcggctctgcccaccagggctgcctgcctccgttcccggcggacgtgttcacgattccccagtacggctacctaacactcaacaacggtagtcaggccgtgggacgctcctccttctactgcctggaatactttccttcgcagatgctgagaaccggcaacaacttccagtttacttacaccttcgaggacgtgcctttccacagcagctacgcccacagccagagcttggaccggctgatgaatcctctgattgaccagtacctgtactacttgtctcggattcaaacaacaggaggcacggcaaatacgcagactctgggcttcagccaaggtgggcctaatacaatggccaatcaggcaaagaactggctgccaggaccctgttaccgccaacaacgcgtctcaacgacaaccgggcaaaacaacaatagcaactttgcctggactgctgggaccaaataccatctgaatggaagaaattcattggctaatcctggcatcgctatggcaacacacaaagacgacgaggagcgtttttttcccagtaacgggatcctgatttttggcaaacaaaatgctgccagagacaatgcggattacagcgatgtcatgcccaccagcgaggaagaaatcaaaaccactaaccctgtggccacagaggaatacggtatcgtggcagataacttgcagcagcaaaacacggctcctcaaattggaactgtcaacagccagggggccttacccggtatggtctggcagaaccgggacgtgtacctgcagggtcccatctgggccaagattcctcacacggacggcaacttccacccgtctccgctgatgggcggctttggcctgaaacatcctccgcctcagatcctgatcaagaacacgcctgtacctgcggatcctccgaccaccttcaaccagtcaaagctgaactctttcatcacgcaatacagcaccggacaggtcagcgtggaaattgaatgggagctgcagaaggaaaacagcaagcgctggaaccccgagatccagtacacctccaactactacaaatctacaagtgtggactttgctgttaatacagaaggcgtgtactctgaaccccgccccattggcacccgttacctcacccgtaatctgtaa

SEQ ID NO: 12517 - DNA, 2217 bp, Artificial Sequence
  source: /note="Description of Artificial Sequence: Synthetic polynucleotide"
atggctgccgatggttatcttccagattggctcgaggacaacctctctgagggcattcgcgagtggtgggcgctgaaacctggagccccgaagcccaaagccaaccagcaaaagcaggacgacggccggggtctggtgcttcctggctacaagtacctcggacccttcaacggactcgacaagggggagcccgtcaacgcggcggacgcggcggccctcgagcacgacaaggcctacgaccagcagctgcaggcgggtgacaatccgtacctgcggtataaccacgccgacgccgagtttcaggagcgtctgcaagaagatacgtcttttgggggcaacctcgggcgagcagtcttccaggccaagaagcgggttctcgaacctctcggtctggttgaggaaggcgctaagacggctcctggaaagaagagaccggtagagtcatcaccccagcgttctccagactcctctacgggcatcggcaagaagggccaacagcccgccagaaaaagactcaattttggtcagactggcgactcagagtcagttccagaccctcaacctctcggagaacctccagcagcgccctctggtgtgggacctaatacaatggctgcaggcggtggcgcaccaatggcagacaataacgaaggcgccgacggagtgggtagttcctcgggaaattggcattgcgattccacatggctgggcgacagagtcatcaccaccagcacccgaacctgggccctgcccacctacaacaaccacctctacaagcaaatctccaacgggacatcgggaggagccaccaacgacaacacctacttcggctacagcaccccctgggggtattttgactttaacagattccactgccacttttcaccacgtgactggcagcgactcatcaacaacaactggggattccggcccaagagactcagcttcaagctcttcaacatccaggtcaaggaggtcacgcagaatgaaggcaccaagaccatcgccaataacctcaccagcaccatccaggtgtttacggactcggagtaccagctgccgtacgttctcggctctgcccaccagggctgcctgcctccgttcccggcggacgtgttcacgattccccagtacggctacctaacactcaacaacggtagtcaggccgtgggacgctcctccttctactgcctggaatactttccttcgcagatgctgagaaccggcaacaacttccagtttacttacaccttcgaggacgtgcctttccacagcagctacgcccacagccagagcttggaccggctgatgaatcctctgattgaccagtacctgtactacttgtctcggattcaaacaacaggaggcacggcaaatacgcagactctgggcttcagccaaggtgggcctaatacaatggccaatcaggcaaagaactggctgccaggaccctgttaccgccaacaacgcgtctcaacgacaaccgggcaaaacaacaatagcaactttgcctggactgctgggaccaaataccatctgaatggaagaaattcattggctaatcctggcatcgctatggcaacacacaaagacgacgaggagcgtttttttcccagtaacgggatcctgatttttggcaaacaaaatgctgccagagacaatgcggattacagcgatgtcatgcccaccagcgaggaagaaatcaaaaccactaaccctgtggccacagaggaatacggtatcgtggcagataacttgcagcagcaaaacacggctcctcaaattggaactgtcaacagccagggggccttacccggtatggtctggcagaaccgggacgtgtacctgcagggtcccatctgggccaagattcctcacacggacggcaacttccacccgtctccgctgatgggcggctttggcctgaaacatcctccgcctcagatcctgatcaagaacacgcctgtacctgcggatcctccgaccaccttcaaccagtcaaagctgaactctttcatcacgcaatacagcaccggacaggtcagcgtggaaattgaatgggagctgcagaaggaaaacagcaagcgctggaaccccgagatccagtacacctccaactactacaaatctacaagtgtggactttgctgttaatacagaaggcgtgtactctgaaccccgccccattggcacccgttacctcacccgtaatctgtaa

SEQ ID NO: 12518 - DNA, 2217 bp, Artificial Sequence
  source: /note="Description of Artificial Sequence: Synthetic polynucleotide"
atggctgccgatggttatcttccagattggctcgaggacaacctctctgagggcattcgcgagtggtgggcgctgaaacctggagccccgaagcccaaagccaaccagcaaaagcaggacgacggccggggtctggtgcttcctggctacaagtacctcggacccttcaacggactcgacaagggggagcccgtcaacgcggcggacgcggcggccctcgagcacgacaaggcctacgaccagcagctgcaggcgggtgacaatccgtacctgcggtataaccacgccgacgccgagtttcaggagcgtctgcaagaagatacgtcttttgggggcaacctcgggcgagcagtcttccaggccaagaagcgggttctcgaacctctcggtctggttgaggaaggcgctaagacggctcctggaaagaagagaccggtagagccatcaccccagcgttctccagactcctctacgggcatcggcaagaagggccaacagcccgccagaaaaagactcaattttggtcagactggcgactcagagtcagttccagaccctcaacctctcggagaacctccagcagcgccctctggtgcgggacctaatacaatggctgcaggcggtggcgcaccaatggcagacaataacgaaggcgccgacggagtgggtagttcctcgggaaattggcattgcgattccacatggctgggcgacagagtcatcaccaccagcacccgaacctgggccctgcccacctacaacaaccacctctacaagcaaatctccaacgggacatcgggaggagccaccaacgacaacacctacttcggctacagcaccccctgggggtattttgactttaacagattccactgccacttttcaccacgtgactggcagcgactcatcaacaacaactggggattccggcccaagagactcagcttcaagctcttcaacatccaggtcaaggaggtcacgcagaatgaaggcaccaagaccatcgccaataacctcaccagcaccatccaggtgtttacggactcggagtaccagctgccgtacgttctcggctctgcccaccagggctgcctgcctccgttcccggcggacgtgttcacgattccccagtacggctacctaacactcaacaacggtagtcaggccgtgggacgctcctccttctactgcctggaatactttccttcgcagatgctgagaaccggcaacaacttccagtttacttacaccttcgaggacgtgcctttccacagcagctacgcccacagccagagcttggaccggctgatgaatcctctgattgaccagtacctgtactacttgtctcggattcaaacaacaggaggcacggcaaatacgcagactctgggcttcagccaaggtgggcctaatacaatggccaatcaggcaaagaactggctgccaggaccctgttaccgccaacaacgcgtctcaacgacaaccgggcaaaacaacaatagcaactttgcctggactgctgggaccaaataccatctgaatggaagaaattcattggctaatcctggcatcgctatggcaacacacaaagacgacgaggagcgtttttttcccagtaacgggatcctgatttttggcaaacaaaatgctgccagagacaatgcggattacagcgatgtcatgcccaccagcgaggaagaaatcaaaaccactaaccctgtggccacagaggaatacggtatcgtggcagataacttgcagcagcaaaacacggctcctcaaattggaactgtcaacagccagggggccttacccggtatggtctggcagaaccgggacgtgtacctgcagggtcccatctgggccaagattcctcacacggacggcaacttccacccgtctccgctgatgggcggctttggcctgaaacatcctccgcctcagatcctgatcaagaacacgcctgtacctgcggatcctccgaccaccttcaaccagtcaaagctgaactctttcatcacgcaatacagcaccggacaggtcagcgtggaaattgaatgggagctgcagaaggaaaacagcaagcgctggaaccccgagatccagtacacctccaactactacaaatctacaagtgtggactttgctgttaatacagaaggcgtgtactctgaaccccgccccattggcacccgttacctcacccgtaatctgtaa

SEQ ID NO: 12519 - DNA, 2217 bp, Artificial Sequence
  source: /note="Description of Artificial Sequence: Synthetic polynucleotide"
atggctgccgatggttatcttccagattggctcgaggacaacctctctgagggcattcgcgagtggtgggcgctgaaacctggagccccgaagcccaaagccaaccagcaaaagcaggacgacggccggggtctggtgcttcctggctacaagtacctcggacccttcaacggactcgacaagggggagcccgtcaacgcggcggacgcggcggccctcgagcacgacaaggcctacgaccagcagctgcaggcgggtgacaatccgtacctgcggtataaccacgccgacgccgagtttcaggagcgtctgcaagaagatacgtcttttgggggcaacctcgggcgagcagtcttccaggccaagaagcgggttctcgaacctctcggtctggttgaggaaggcgctaagacggctcctggaaagaagagaccggtagagccatcaccccagcgttctccagactcctctacgggcatcggcaagaagggccaacagcccgccagaaaaagactcaattttggtcagactggcgactcagagtcagttccagaccctcaacctctcggagaacctccagcagcgccctctggtgtgggacctaatacaatggctgcaggcggtggcgcaccaatggcagacaataacgaaggcgccgacggagtgggtagttcctcgggaaattggcattgcgattccacatggctgggcgacagagtcatcaccaccagcacccgaacctgggccctgcccacctacaacaaccacctctacaagcaaatctccaacgggacatcgggaggagccaccaacgacaacacctacttcggctacagcaccccctgggggtattttgactttaacagattccactgccacttttcaccacgtgactggcagcgactcatcaacaacaactggggattccggcccaagagactcagcttcaagctcttcaacatccaggtcaaggaggtcacgcagaatgaaggcaccaagaccatcgccaataacctcaccagcaccatccaggtgtttacggactcggagtaccagctgccgtacgttctcggctctgcccaccagggctgcctgcctccgttcccggcggacgtgttcacgattccccagtacggctacctaacactcaacaacggtagtcaggccgtgggacgctcctccttctactgcctggaatactttccttcgcagatgctgagaaccggcaacaacttccagtttacttacaccttcgaggacgtgcctttccacagcagctacgcccacagccagagcttggaccggctgatgaatcctctgattgaccagtacccgtactacttgtctcggattcaaacaacaggaggcacggcaaatacgcagactctgggcttcagccaaggtgggcctaatacaatggccaatcaggcaaagaactggctgccaggaccctgttaccgccaacaacgcgtctcaacgacaaccgggcaaaacaacaatagcaactttgcctggactgctgggaccaaataccatctgaatggaagaaattcattggctaatcctggcatcgctatggcaacacacaaagacgacgaggagcgtttttttcccagtaacgggatcctgatttttggcaaacaaaatgctgccagagacaatgcggattacagcgatgtcatgcccaccagcgaggaagaaatcaaaaccactaaccctgtggccacagaggaatacggtatcgtggcagataacttgcagcagcaaaacacggctcctcaaattggaactgtcaacagccagggggccttacccggtatggtctggcagaaccgggacgtgtacctgcagggtcccatctgggccaagattcctcacacggacggcaacttccacccgtctccgctgatgggcggctttggcctgaaacatcctccgcctcagatcctgatcaagaacacgcctgtacctgcggatcctccgaccaccttcaaccagtcaaagctgaactctttcatcacgcaatacagcaccggacaggtcagcgtggaaattgaatgggagctgcagaaggaaaacagcaagcgctggaaccccgagatccagtacacctccaactactacaaatctacaagtgtggactttgctgttaatacagaaggcgtgtactctgaaccccgccccattggcacccgttacctcacccgtaatctgtaa

SEQ ID NO: 12520 - DNA, 2217 bp, Artificial Sequence
  source: /note="Description of Artificial Sequence: Synthetic polynucleotide"
atggctgccgatggttatcttccagattggctcgaggacaacctctctgagggcattcgcgagtggtgggcgctgaaacctggagccccgaagcccaaagccaaccagcaaaagcaggacgacggccggggtctggtgcttcctggctacaagtacctcggacccttcaacggactcgacaagggggagcccgtcaacgcggcggacgcggcggccctcgagcacgacaaggcctacgaccagcagctgcaggcgggtgacaatccgtacctgcggtataaccacgccgacgccgagtttcaggagcgtctgcaagaagatacgtcttttgggggcaacctcgggcgagcagtcttccaggccaagaagcgggttctcgaacctctcggtctggttgaggaaggcgctaagacggctcctggaaagaagagaccggtagagccatcaccccagcgttctccagactcctctacgggcatcggcaagaagggccaacagcccgccagaaaaagactcaattttggtcagactggcgactcagagtcagttccagaccctcaacctctcggagaacctccagcagcgccctctggtgtgggacctaatacaatggctgcaggcggtggcgcaccaatggcagacaataacgaaggcgccgacggagtgggtagttcctcgggaaattggcattgcgattccacatggctgggcgacagagtcatcaccaccagcacccgaacctgggccctgcccacctacaacaaccacctctacaagcaaatctccaacgggacatcgggaggagccaccaacgacaacacctacttcggctacagcaccccctgggggtattttgactttaacagattccactgccacttttcaccacgtgactggcagcgactcatcaacaacaactggggattccggcccaagagactcagcttcaagctcttcaacatccaggtcaaggaggtcacgcagaatgaaggcaccaagaccatcgccaataacctcaccagcaccatccaggtgtttacggactcggagtaccagctgccgtacgttctcggctctgcccaccagggctgcctgcctccgttcccggcggacgtgttcacgattccccagtacggctacctaacactcaacaacggtagtcaggccgtgggacgctcctccttctactgcctggaatactttccttcgcagatgctgagaaccggcaacaacttccagtttacttacaccttcgaggacgtgcctttccacagcagctacgcccacagccagagcttggaccggctgatgaatcctctgattgaccagtacctgtactacttgtctcggattcaaacaacaggaggcacggcaaatacgcagactctgggcttcagccaaggtgggcctaatacaatggccaatcaggcaaagaactggctgccaggaccctgttaccgccaacaacgcgtctcaacgacaaccgggcaaagcaacaatagcaactttgcctggactgctgggaccaaataccatctgaatggaagaaattcattggctaatcctggcatcgctatggcaacacacaaagacgacgaggagcgtttttttcccagtaacgggatcctgatttttggcaaacaaaatgctgccagagacaatgcggattacagcgatgtcatgcccaccagcgaggaagaaatcaaaaccactaaccctgtggccacagaggaatacggtatcgtggcagataacttgcagcagcaaaacacggctcctcaaattggaactgtcaacagccagggggccttacccggtatggtctggcagaaccgggacgtgtacctgcagggtcccatctgggccaagattcctcacacggacggcaacttccacccgtctccgctgatgggcggctttggcctgaaacatcctccgcctcagatcctgatcaagaacacgcctgtacctgcggatcctccgaccaccttcaaccagtcaaagctgaactctttcatcacgcaatacagcaccggacaggtcagcgtggaaattgaatgggagctgcagaaggaaaacagcaagcgctggaaccccgagatccagtacacctccaactactacaaatctacaagtgtggactttgctgttaatacagaaggcgtgtactctgaaccccgccccattggcacccgttacctcacccgtaatctgtaa

SEQ ID NO: 12521 - DNA, 2217 bp, Artificial Sequence
  source: /note="Description of Artificial Sequence: Synthetic polynucleotide"
atggctgccgatggttatcttccagattggctcgaggacaacctctctgagggcattcgcgagtggtgggcgctgaaacctggagccccgaagcccaaagccaaccagcaaaagcaggacgacggccggggtctggtgcttcctggctacaagtacctcggacccttcaacggactcgacaagggggagcccgtcaacgcggcggacgcggcggccctcgagcacgacaaggcctacgaccagcagctgcaggcgggtgacaatccgtacctgcggtataaccacgccgacgccgagtttcaggagcgtctgcaagaagatacgtcttttgggggcaacctcgggcgagcagtcttccaggccaagaagcgggttctcgaacctctcggtctggttgaggaaggcgctaagacggctcctggaaagaagagaccggtagagccatcaccccagcgttctccagactcctctacgggcatcggcaagaagggccaacagcccgccagaaaaagactcaattttggtcagactggcgactcagagtcagttccagaccctcaacctctcggagaacctccagcagcgccctctggtgtgggacctaatacaatggctgcaggcggtggcgcaccaatggcagacaataacgaaggcgccgacggagtgggtagttcctcgggaaattggcattgcgattccacatggctgggcgacagagtcatcaccaccagcacccgaacctgggccctgcccacctacaacaaccacctctacaagcaaatctccaacgggacatcgggaggagccaccaacgacaacacctacttcggctacagcaccccctgggggtattttgactttaacagattccactgccacttttcaccacgtgactggcagcgactcatcaacaacaactggggattccggcccaagagactcagcttcaagctcttcaacatccaggtcaaggaggtcacgcagaatgaaggcaccaagaccatcgccaataacctcaccagcaccatccaggtgtttacggactcggagtaccagctgccgtacgttctcggctctgcccaccagggctgcctgcctccgttcccggcggacgtgttcacgattccccagtacggctacctaacactcaacaacggtagtcaggccgtgggacgctcctccttctactgcctggaatactttccttcgcagatgctgagaaccggcaacaacttccagtttacttacaccttcgaggacgtgcctttccacagcagctacgcccacagccagagcttggaccggctgatgaatcctctgattgaccagtacctgtactacttgtctcggattcaaacaacaggaggcacggcaaatacgcagactctgggcttcagccaaggtgggcctaatacaatggccaatcaggcaaagaactggctgccaggaccccgttaccgccaacaacgcgtctcaacgacaaccgggcaaaacaacaatagcaactttgcctggactgctgggaccaaataccatctgaatggaagaaattcattggctaatcctggcatcgctatggcaacacacaaagacgacgaggagcgtttttttcccagtaacgggatcctgatttttggcaaacaaaatgctgccagagacaatgcggattacagcgatgtcatgcccaccagcgaggaagaaatcaaaaccactaaccctgtggccacagaggaatacggtatcgtggcagataacttgcagcagcaaaacacggctcctcaaattggaactgtcaacagccagggggccttacccggtatggtctggcagaaccgggacgtgtacctgcagggtcccatctgggccaagattcctcacacggacggcaacttccacccgtctccgctgatgggcggctttggcctgaaacatcctccgcctcagatcctgatcaagaacacgcctgtacctgcggatcctccgaccaccttcaaccagtcaaagctgaactctttcatcacgcaatacagcaccggacaggtcagcgtggaaattgaatgggagctgcagaaggaaaacagcaagcgctggaaccccgagatccagtacacctccaactactacaaatctacaagtgtggactttgctgttaatacagaaggcgtgtactctgaaccccgccccattggcacccgttacctcacccgtaatctgtaa

SEQ ID NO: 12522 - DNA, 2217 bp, Artificial Sequence
  source: /note="Description of Artificial Sequence: Synthetic polynucleotide"
atggctgccgatggttatcttccagattggctcgaggacaacctctctgagggcattcgcgagtggtgggcgctgaaacctggagccccgaagcccaaagccaaccagcaaaagcaggacgacggccggggtctggtgcttcctggctacaagtacctcggacccttcaacggactcgacaagggggagcccgtcaacgcggcggacgcggcggccctcgagcacgacaaggcctacgaccagcagctgcaggcgggtgacaatccgtacctgcggtataaccacgccgacgccgagtttcaggagcgtctgcaagaagatacgtcttttgggggcaacctcgggcgagcagtcttccaggccaagaagcgggttctcgaacctctcggtctggttgaggaaggcgctaagacggctcctggaaagaagagaccggtagagccatcaccccagcgttctccagactcctctacgggcatcggcaagaagggccaacagcccgccagaaaaagactcaattttggtcagactggcgactcagagtcagttccagaccctcaacctctcggagaacctccagcagcgccctctggtgtgggacctaatacaatggctgcaggcggtggcgcaccaatggcagacaataacgaaggcgccgacggagtgggtagttcctcgggaaattggcattgcgattccacatggctgggcgacagagtcatcaccaccagcacccgaacctgggccctgcccacctacaacaaccacctctacaagcaaatctccaacgggacatcgggaggagccaccaacgacaacacctacttcggctacagcaccccctgggggtattttgactttaacagattccactgccacttttcaccacgtgactggcagcgactcatcaacaacaactggggattccggcccaagagactcagcttcaagctcttcaacatccaggtcaaggaggtcacgcagaatgaaggcaccaagaccatcgccaataacctcaccagcaccatccaggtgtttacggactcggagtaccagctgccgtacgttctcggctctgcccaccagggctgcctgcctccgttcccggcggacgtgttcacgattccccagtacggctacctaacactcaacaacggtagtcaggccgtgggacgctcctccttctactgcctggaatactttccttcgcagatgctgagaaccggcaacaacttccagtttacttacaccttcgaggacgtgcctttccacagcagctacgcccacagccagagcttggaccggctgatgaatcctctgattgaccagtacctgtactacttgtctcggattcaaacaacaggaggcacggcaaatacgcagactctgggcttcagccaaggtgggcctaatacaatggccaatcaggcaaagaactggctgccaggaccctgttaccgccaacaacgcgtctcaacgacaaccgggcaaaacaacaatagcaactttgcctggactgctgggaccaaataccatctgaatggaagaaattcattggctaatcctggcatcgctatggcaacacacaaagacgacgaggagcgtttttttcccagtaacgggatcctgatttttggcaaacaaaatgctgccagagacaatgcggattacagcgatgtcatgcccaccagcgaggaagaaatcaaaaccactaaccctgtggccacagaggaatacggtatcgtggcagataacttgcagcagcaaaacacggctcctcaaattggaactgtcaacagccagggggccttacccggtatggtctggcagaaccgggacgtgtacctgcagggtcccatctgggccaagattcctcacacggacggcaacttccacccgtctccgctgatgggcggctttggcctgaaacatcctccgcctcagatcctgatcaagaacgcgcctgtacctgcggatcctccgaccaccttcaaccagtcaaagctgaactctttcatcacgcaatacagcaccggacaggtcagcgtggaaattgaatgggagctgcagaaggaaaacagcaagcgctggaaccccgagatccagtacacctccaactactacaaatctacaagtgtggactttgctgttaatacagaaggcgtgtactctgaaccccgccccattggcacccgttacctcacccgtaatctgtaa

SEQ ID NO: 12523 - DNA, 2217 bp, Artificial Sequence
  source: /note="Description of Artificial Sequence: Synthetic polynucleotide"
atggctgccgatggttatcttccagattggctcgaggacaacctctctgagggcattcgcgagtggtgggcgctgaaacctggagccccgaagcccaaagccaaccagcaaaagcaggacgacggccggggtctggtgcttcctggctacaagtacctcggacccttcaacggactcgacaagggggagcccgtcaacgcggcggacgcggcggccctcgagcacgacaaggcctacgaccagcagctgcaggcgggtgacaatccgtacctgcggtataaccacgccgacgccgagtttcaggagcgtctgcaagaagatacgtcttttgggggcaacctcgggcgagcagtcttccaggccaagaagcgggttctcgaacctctcggtctggttgaggaaggcgctaagacggctcctggaaagaagagaccggtagagccatcaccccagcgttctccagactcctctacgggcatcggcaagaagggccaacagcccgccagaaaaagactcaattttggtcagactggcgactcagagtcagttccagaccctcaacctctcggagaacctccagcagcgccctctggtgtgggacctaatacaatggctgcaggcggtggcgcaccaatggcagacaataacgaaggcgccgacggagtgggtagttcctcgggaaattggcattgcgattccacatggctgggcgacagagtcatcaccaccagcacccgaacctgggccctgcccacctacaacaaccacctctacaagcaaatctccaacgggacatcgggaggagccaccaacgacaacacctacttcggctacagcaccccctgggggtattttgactttaacagattccactgccacttttcaccacgtgaccggcagcgactcatcaacaacaactggggattccggcccaagagactcagcttcaagctcttcaacatccaggtcaaggaggtcacgcagaatgaaggcaccaagaccatcgccaataacctcaccagcaccatccaggtgtttacggactcggagtaccagctgccgtacgttctcggctctgcccaccagggctgcctgcctccgttcccggcggacgtgttcacgattccccagtacggctacctaacactcaacaacggtagtcaggccgtgggacgctcctccttctactgcctggaatactttccttcgcagatgctgagaaccggcaacaacttccagtttacttacaccttcgaggacgtgcctttccacagcagctacgcccacagccagagcttggaccggctgatgaatcctctgattgaccagtacctgtactacttgtctcggattcaaacaacaggaggcacggcaaatacgcagactctgggcttcagccaaggtgggcctaatacaatggccaatcaggcaaagaactggctgccaggaccctgttaccgccaacaacgcgtctcaacgacaaccgggcaaaacaacaatagcaactttgcctggactgctgggaccaaataccatctgaatggaagaaattcattggctaatcctggcatcgctatggcaacacacaaagacgacgaggagcgtttttttcccagtaacgggatcctgatttttggcaaacaaaatgctgccagagacaatgcggattacagcgatgtcatgcccaccagcgaggaagaaatcaaaaccactaaccctgtggccacagaggaatacggtatcgtggcagataacttgcagcagcaaaacacggctcctcaaattggaactgtcaacagccagggggccttacccggtatggtctggcagaaccgggacgtgtacctgcagggtcccatctgggccaagattcctcacacggacggcaacttccacccgtctccgctgatgggcggctttggcctgaaacatcctccgcctcagatcctgatcaagaacacgcctgtacctgcggatcctccgaccaccttcaaccagtcaaagctgaactctttcatcacgcaatacagcaccggacaggtcagcgtggaaattgaatgggagctgcagaaggaaaacagcaagcgctggaaccccgagatccagtacacctccaactactacaaatctacaagtgtggactttgctgttaatacagaaggcgtgtactctgaaccccgccccattggcacccgttacctcacccgtaatctgtaa

SEQ ID NO: 12524 - DNA, 2217 bp, Artificial Sequence
  source: /note="Description of Artificial Sequence: Synthetic polynucleotide"
atggctgccgatggttatcttccagattggctcgaggacaacctctctgagggcattcgcgagtggtgggcgctgaaacctggagccccgaagcccaaagccaaccagcaaaagcaggacgacggccggggtctggtgcttcctggctacaagtacctcggacccttcaacggactcgacaagggggagcccgtcaacgcggcggacgcggcggccctcgagcacgacaaggcctacgaccagcagctgcaggcgggtgacaatccgtacctgcggtataaccacgccgacgccgagtttcaggagcgtctgcaagaagatacgtcttttgggggcaacctcgggcgagcagtcttccaggccaagaagcgggttctcgaacctctcggtctggttgaggaaggcgctaagacggctcctggaaagaagagaccggtagagccatcaccccagcgttctccagactcctctacgggcatcggcaagaagggccaacagcccgccagaaaaagactcaattttggtcagactggcgactcagagtcagttccagaccctcaacctctcggagaacctccagcagcgccctctggtgtgggacctaatacaatggctgcaggcggtggcgcaccaatggcagacaataacgaaggcgccgacggagtgggtagttcctcgggaaattggcattgcgattccacatggctgggcgacagagtcatcaccaccagcacccgaacctgggccctgcccacctacaacaaccacctctacaagcaaatctccaacgggacatcgggaggagccaccaacgacaacacctacttcggctacagcaccccctgggggtattttgactttaacagattccactgccacttttcaccacgtgactggcagcgactcatcaacaacaactggggattccggcccaagagactcagcttcaagctcttcaacatccaggtcaaggaggtcacgcagaatgaaggcaccaagaccatcgccaataacctcaccagcaccatccaggtgtttacggactcggagtaccagctgccgtacgttctcggctctgcccaccagggctgcctgcctccgttcccggcggacgtgttcacgattccccagtacggctacctaacactcaacaacggtagtcaggccgtgggacgctcctccttctactgcctggaatactttccttcgcagatgctgagaaccggcaacaacttccagtttacttacaccttcgaggacgtgcctttccacagcagctacgcccacagccagagcttggaccggctgatgaatcctctgattgaccagtacctgtactacttgtctcggattcaaacaacaggaggcacggcaaatacgcagactctgggcttcagccaaggtgggcctaatacaatggccaatcaggcaaagaactggctgccaggaccctgttaccgccaacaacgcgtctcaacgacaaccgggcaaaacaacaatagcaactttgcctggactgctgggaccaaataccatctgaatggaagaaattcattggctaatcctggcatcgctatggcaacacacaaagacgacgaggagcgtttttttcccagtaacgggatcctgatttttggcaaacaaaatgctgccagagacaatgcggattacagcgatgtcatgcccaccagcgaggaagaaatcaaaaccactaaccctgtggccacagaggaatacggtatcgtggcagataacttgcagcagcaaaacacggctcctcaaattggaactgtcaacagccagggggccttacccggtatggtctggcagaaccgggacgtgtacctgcagggtcccatctgggccaagattcctcacacggacggcagcttccacccgtctccgctgatgggcggctttggcctgaaacatcctccgcctcagatcctgatcaagaacacgcctgtacctgcggatcctccgaccaccttcaaccagtcaaagctgaactctttcatcacgcaatacagcaccggacaggtcagcgtggaaattgaatgggagctgcagaaggaaaacagcaagcgctggaaccccgagatccagtacacctccaactactacaaatctacaagtgtggactttgctgttaatacagaaggcgtgtactctgaaccccgccccattggcacccgttacctcacccgtaatctgtaa

SEQ ID NO: 12525 - DNA, 2217 bp, Artificial Sequence
  source: /note="Description of Artificial Sequence: Synthetic polynucleotide"
atggctgccgatggttatcttccagattggctcgaggacaacctctctgagggcattcgcgagtggtgggcgctgaaacctggagccccgaagcccaaagccaaccagcaaaagcaggacgacggccggggtctggtgcttcctggctacaagtacctcggacccttcaacggactcgacaagggggagcccgtcaacgcggcggacgcggcggccctcgagcacgacaaggcctacgaccagcagctgcaggcgggtgacaatccgtacctgcggtataaccacgccgacgccgagtttcaggagcgtctgcaagaagatacgtcttttgggggcaacctcgggcgagcagtcttccaggccaagaagcgggttctcgaacctctcggtctggttgaggaaggcgctaagacggctcctggaaagaagagaccggtagagccatcaccccagcgttctccagactcctctacgggcatcggcaagaagggccaacagcccgccagaaaaagactcaattttggtcagactggcgactcagagtcagttccagaccctcaacctctcggagaacctccaacagcgccctctggtgtgggacctaatacaatggctgcaggcggtggcgcaccaatggcagacaataacgaaggcgccgacggagtgggtagttcctcgggaaattggcattgcgattccacatggctgggcgacagagtcatcaccaccagcacccgaacctgggccctgcccacctacaacaaccacctctacaagcaaatctccaacgggacatcgggaggagccaccaacgacaacacctacttcggctacagcaccccctgggggtattttgactttaacagattccactgccacttttcaccacgtgactggcagcgactcatcaacaacaactggggattccggcccaagagactcagcttcaagctcttcaacatccaggtcaaggaggtcacgcagaatgaaggcaccaagaccatcgccaataacctcaccagcaccatccaggtgtttacggactcggagtaccagctgccgtacgttctcggctctgcccaccagggctgcctgcctccgttcccggcggacgtgttcacgattccccagtacggctacctaacactcaacaacggtagtcaggccgtgggacgctcctccttctactgcctggaatactttccttcgcagatgctgagaaccggcaacaacttccagtttacttacaccttcgaggacgtgcctttccacagcagctacgcccacagccagagcttggaccggctgatgaatcctctgattgaccagtacctgtactacttgtctcggattcaaacaacaggaggcacggcaaatacgcagactctgggcttcagccaaggtgggcctaatacaatggccaatcaggcaaagaactggctgccaggaccctgttaccgccaacaacgcgtctcaacgacaaccgggcaaaacaacaatagcaactttgcctggactgctgggaccaaataccatctgaatggaagaaattcattggctaatcctggcatcgctatggcaacacacaaagacgacgaggagcgtttttttcccagtaacgggatcctgatttttggcaaacaaaatgctgccagagacaatgcggattacagcgatgtcatgcccaccagcgaggaagaaatcaaaaccactaaccctgtggccacagaggaatacggtatcgtggcagataacttgcagcagcaaaacacggctcctcaaattggaactgtcaacagccagggggccttacccggtatggtctggcagaaccgggacgtgtacctgcagggtcccatctgggccaagattcctcacacggacggcaacttccacccgtctccgctgatgggcggctttggcctgaaacatcctccgcctcagatcctgatcaagaacacgcctgtacctgcggatcctccgaccaccttcaaccagtcaaagctgaactctttcatcacgcaatacagcaccggacaggtcagcgtggaaattgaatgggagctgcagaaggaaaacagcaagcgctggaaccccgagatccagtacacctccaactactacaaatctacaagtgtggactttgctgttaatacagaaggcgtgtactctgaaccccgccccattggcacccgttacctcacccgtaatctgtaa

SEQ ID NO: 12526 - DNA, 2217 bp, Artificial Sequence
  source: /note="Description of Artificial Sequence: Synthetic polynucleotide"
atggctgccgatggttatcttccagattggctcgaggacaacctctctgagggcattcgcgagtggtgggcgctgaaacctggagccccgaagcccaaagccaaccagcaaaagcaggacgacggccggggtctggtgcttcctggctacaagtacctcggacccttcaacggactcgacaagggggagcccgtcaacgcggcggacgcggcggccctcgagcacgacaaggcctacgaccagcagctgcaggcgggtgacaatccgtacctgcggtataaccacgccgacgccgagtttcaggagcgtctgcaagaagatacgtcttttgggggcaacctcgggcgagcagtcttccaggccaagaagcgggttctcgaacctctcggtctggttgaggaaggcgctaagacggctcctggaaagaagagaccggtagagccatcaccccagcgttctccagactcctctacgggcatcggcaagaagggccaacagcccgccagaaaaagactcaattttggtcagactggcgactcagagtcagttccagaccctcaacctctcggagaacctccagcagcgccctctggtgtgggacctaatacaatggctgcaggcggtggcgcaccaatggcagacaataacgaaggcgccgacggagtgggtagttcctcgggaaattggcattgcgattccacatggctgggcgacagagtcatcaccaccagcacccgaacctgggccctgcccacctacaacaaccacctctacaagcaaatctccaacgggacatcgggaggagccaccaacgacaacacctacttcggctacagcaccccctgggggtattttgactttaacagattccactgccacttttcaccacgtgactggcagcgactcatcaacaacaactggggattccggcccaagagactcagcttcaagctcttcaacatccaggtcaaggaggtcacgcagaatgaaggcaccaagaccatcgccaataacctcaccagcaccatccaggtgtttacggactcggagtaccagctgccgtacgttctcggctctgcccaccagggctgcctgcctccgttcccggcggacgtgttcacgattccccagtacggctacctaacactcaacaacggtagtcaggccgtgggacgctcctccttctactgcctggaatactttccttcgcagatgctgagaaccggcaacaacttccagtttacttacaccttcgaggacgtgcctttccacagcagctacgcccacagccagagcttggaccggctgatgaatcctctgattgaccagtacctgtactacttgtctcggattcaaacaacaggaggcacggcaaatacgcagactctgggcttcagccaaggtgggcctaatacaatggccaatcaggcaaagaactggctgccaggaccctgttaccgccaacaacgcgtctcaacgacaaccgggcaaaacaacaatagcaactttgcctggactgctgggaccaaataccatctgaatggaagaaattcattggctaatcctggcatcgctatggcaacacacaaagacgacgaggagcgtttttttcccagtaacgggatcctgatttttggcaaacaaaatgctgccagagacaatgcggattacagcgatgtcatgcccaccagcgaggaagaaatcaaaaccactaaccctgtggccacagaggaatacggtatcgtggcagataacttgcagcagcaaaacacggctcctcaaattggaactgtcaacagccagggggccttacccggtatggtctggcagaaccgggacgtgtacctgcagggtcccatctgggccaagattcctcacacggacggcaacttccacccgtctccgctgatgggcggctttggcctgaaacatcctccgcctcagatcctgatcaagaacacgcctgtacctgcggatcctccgaccaccttcaaccagtcaaagctgaactctttcatcacgcaatacagcaccggacaggtcagcgtggaaattgaatgggagctgcagaaggaaaacagcaagcgctggaaccccgagatccagtacacctccaactactacaaatctacaagtgtggactttgctgttaatgcagaaggcgtgtactctgaaccccgccccattggcacccgttacctcacccgtaatctgtaa

SEQ ID NO: 12527 - DNA, 2217 bp, Artificial Sequence
  source: /note="Description of Artificial Sequence: Synthetic polynucleotide"
atggctgccgatggttatcttccagattggctcgaggacaacctctctgagggcattcgcgagtggtgggcgctgaaacctggagccccgaagcccaaagccaaccagcaaaagcaggacgacggccggggtctggtgcttcctggctacaagtacctcggacccttcaacggactcgacaagggggagcccgtcaacgcggcggacgcggcggccctcgagcacgacaaggcctacgaccagcagctgcaggcgggtgacaatccgtacctgcggtataaccacgccgacgccgagtttcaggagcgtctgcaagaagatacgtcttttgggggcaacctcgggcgagcagtcttccaggccaagaagcgggttctcgaacctctcggtctggttgaggaaggcgctaagacggctcctggaaagaagagaccggtagagccatcaccccagcgttctccagactcctctacgggcatcggcaagaagggccaacagcccgccagaaaaagactcaattttggtcagactggcgactcagagtcagttccagaccctcaacctctcggagaacctccagcagcgccctctggtgtgggacctaatacaatggctgcaggcggtggcgcaccaatggcagacaataacgaaggcgccgacggagcgggtagttcctcgggaaattggcattgcgattccacatggctgggcgacagagtcatcaccaccagcacccgaacctgggccctgcccacctacaacaaccacctctacaagcaaatctccaacgggacatcgggaggagccaccaacgacaacacctacttcggctacagcaccccctgggggtattttgactttaacagattccactgccacttttcaccacgtgactggcagcgactcatcaacaacaactggggattccggcccaagagactcagcttcaagctcttcaacatccaggtcaaggaggtcacgcagaatgaaggcaccaagaccatcgccaataacctcaccagcaccatccaggtgtttacggactcggagtaccagctgccgtacgttctcggctctgcccaccagggctgcctgcctccgttcccggcggacgtgttcacgattccccagtacggctacctaacactcaacaacggtagtcaggccgtgggacgctcctccttctactgcctggaatactttccttcgcagatgctgagaaccggcaacaacttccagtttacttacaccttcgaggacgtgcctttccacagcagctacgcccacagccagagcttggaccggctgatgaatcctctgattgaccagtacctgtactacttgtctcggattcaaacaacaggaggcacggcaaatacgcagactctgggcttcagccaaggtgggcctaatacaatggccaatcaggcaaagaactggctgccaggaccctgttaccgccaacaacgcgtctcaacgacaaccgggcaaaacaacaatagcaactttgcctggactgctgggaccaaataccatctgaatggaagaaattcattggctaatcctggcatcgctatggcaacacacaaagacgacgaggagcgtttttttcccagtaacgggatcctgatttttggcaaacaaaatgctgccagagacaatgcggattacagcgatgtcatgcccaccagcgaggaagaaatcaaaaccactaaccctgtggccacagaggaatacggtatcgtggcagataacttgcagcagcaaaacacggctcctcaaattggaactgtcaacagccagggggccttacccggtatggtctggcagaaccgggacgtgtacctgcagggtcccatctgggccaagattcctcacacggacggcaacttccacccgtctccgctgatgggcggctttggcctgaaacatcctccgcctcagatcctgatcaagaacacgcctgtacctgcggatcctccgaccaccttcaaccagtcaaagctgaactctttcatcacgcaatacagcaccggacaggtcagcgtggaaattgaatgggagctgcagaaggaaaacagcaagcgctggaaccccgagatccagtacacctccaactactacaaatctacaagtgtggactttgctgttaatacagaaggcgtgtactctgaaccccgccccattggcacccgttacctcacccgtaatctgtaa

SEQ ID NO: 12528 - DNA, 2217 bp, Artificial Sequence
  source: /note="Description of Artificial Sequence: Synthetic polynucleotide"
atggctgccgatggttatcttccagattggctcgaggacaacctctctgagggcattcgcgagtggtgggcgctgaaacctggagccccgaagcccaaagccaaccagcaaaagcaggacgacggccggggtctggtgcttcctggctacaagtacctcggacccttcaacggactcgacaagggggagcccgtcaacgcggcggacgcggcggccctcgagcacgacaaggcctacgaccagcagctgcaggcgggtgacaatccgtacctgcggtataaccacgccgacgccgagtttcaggagcgtctgcaagaagatacgtcttttgggggcaacctcgggcgagcagtcttccaggccaagaagcgggttctcgaacctctcggtctggttgaggaaggcgctaagacggctcctggaaagaagagaccggtagagccatcaccccagcgttctccagactcctctacgggcatcggcaagaagggccaacagcccgccagaaaaagactcaattttggtcagactggcgactcagagtcagttccagaccctcaacctctcggagaacctccagcagcgccctctggtgtgggacctaatacaatggctgcaggcggtggcgcaccaatggcagacaataacgaaggcgccgacggagtgggtagttcctcgggaaattggcattgcgattccacatggctgggcgacagagccatcaccaccagcacccgaacctgggccctgcccacctacaacaaccacctctacaagcaaatctccaacgggacatcgggaggagccaccaacgacaacacctacttcggctacagcaccccctgggggtattttgactttaacagattccactgccacttttcaccacgtgactggcagcgactcatcaacaacaactggggattccggcccaagagactcagcttcaagctcttcaacatccaggtcaaggaggtcacgcagaatgaaggcaccaagaccatcgccaataacctcaccagcaccatccaggtgtttacggactcggagtaccagctgccgtacgttctcggctctgcccaccagggctgcctgcctccgttcccggcggacgtgttcacgattccccagtacggctacctaacactcaacaacggtagtcaggccgtgggacgctcctccttctactgcctggaatactttccttcgcagatgctgagaaccggcaacaacttccagtttacttacaccttcgaggacgtgcctttccacagcagctacgcccacagccagagcttggaccggctgatgaatcctctgattgaccagtacctgtactacttgtctcggattcaaacaacaggaggcacggcaaatacgcagactctgggcttcagccaaggtgggcctaatacaatggccaatcaggcaaagaactggctgccaggaccctgttaccgccaacaacgcgtctcaacgacaaccgggcaaaacaacaatagcaactttgcctggactgctgggaccaaataccatctgaatggaagaaattcattggctaatcctggcatcgctatggcaacacacaaagacgacgaggagcgtttttttcccagtaacgggatcctgatttttggcaaacaaaatgctgccagagacaatgcggattacagcgatgtcatgcccaccagcgaggaagaaatcaaaaccactaaccctgtggccacagaggaatacggtatcgtggcagataacttgcagcagcaaaacacggctcctcaaattggaactgtcaacagccagggggccttacccggtatggtctggcagaaccgggacgtgtacctgcagggtcccatctgggccaagattcctcacacggacggcaacttccacccgtctccgctgatgggcggctttggcctgaaacatcctccgcctcagatcctgatcaagaacacgcctgtacctgcggatcctccgaccaccttcaaccagtcaaagctgaactctttcatcacgcaatacagcaccggacaggtcagcgtggaaattgaatgggagctgcagaaggaaaacagcaagcgctggaaccccgagatccagtacacctccaactactacaaatctacaagtgtggactttgctgttaatacagaaggcgtgtactctgaaccccgccccattggcacccgttacctcacccgtaatctgtaa

SEQ ID NO: 12529 - DNA, 2217 bp, Artificial Sequence
  source: /note="Description of Artificial Sequence: Synthetic polynucleotide"
atggctgccgatggttatcttccagattggctcgaggacaacctctctgagggcattcgcgagtggtgggcgctgaaacctggagccccgaagcccaaagccaaccagcaaaagcaggacgacggccggggtctggtgcttcctggctacaagtacctcggacccttcaacggactcgacaagggggagcccgtcaacgcggcggacgcggcggccctcgagcacgacaaggcctacgaccagcagctgcaggcgggtgacaatccgtacctgcggtataaccacgccgacgccgagtttcaggagcgtctgcaagaagatacgtcttttgggggcaacctcgggcgagcagtcttccaggccaagaagcgggttctcgaacctctcggtctggttgaggaaggcgctaagacggctcctggaaagaagagaccggtagagccatcaccccagcgttctccagactcctctacgggcatcggcaagaagggccaacagcccgccagaaaaagactcaattttggtcagactggcgactcagagtcagttccagaccctcaacctctcggagaacctccagcagcgccctctggtgtgggacctaatacaatggctgcaggcggtggcgcaccaatggcagacaataacgaaggcgccgacggagtgggtagttcctcgggaaattggcattgcgattccacatggctgggcgacagagtcatcaccaccagcacccgaacctgggccctgcccacctacaacaaccacctctacaagcaaatctccaacgggacatcgggaggagccaccaacgacaacacctacttcggctacagcaccccctgggggtattttgactttaacagattccactgccacttttcaccacgtgactggcagcgactcatcaacaacaactggggattccggcccaagagactcagcttcaagctcttcaacatccaggtcaaggaggtcacgcagaatgaaggcaccaagaccatcgccaataacctcaccagcaccatccaggtgtttacggactcggagtaccagctgccgtacgttctcggctctgcccaccagggctgcctgcctccgttcccggcggacgtgttcacgattccccagtacggctacctaacactcaacaacggtagtcaggccgtgggacgctcctccttctactgcctggaatactttccttcgcagatgctgagaaccggcaacaacttccagtttacttacaccttcgaggacgtgcctttccacagcagctacgcccacagccagagcttggaccggctgatgaatcctctgattgaccagtacctgtactacttgtctcggattcaaacaacaggaggcacggcaaatacgcagactctgggcttcagccaaggtgggcctaatacaatggccaatcaggcaaagaactggctgccaggaccctgttaccgccaacaacgcgtctcaacgacaaccgggcaaaacaacaatagcaactttgcctggactgctgggaccaaataccatctgaatggaagaaattcattggctaatcctggcgtcgctatggcaacacacaaagacgacgaggagcgtttttttcccagtaacgggatcctgatttttggcaaacaaaatgctgccagagacaatgcggattacagcgatgtcatgcccaccagcgaggaagaaatcaaaaccactaaccctgtggccacagaggaatacggtatcgtggcagataacttgcagcagcaaaacacggctcctcaaattggaactgtcaacagccagggggccttacccggtatggtctggcagaaccgggacgtgtacctgcagggtcccatctgggccaagattcctcacacggacggcaacttccacccgtctccgctgatgggcggctttggcctgaaacatcctccgcctcagatcctgatcaagaacacgcctgtacctgcggatcctccgaccaccttcaaccagtcaaagctgaactctttcatcacgcaatacagcaccggacaggtcagcgtggaaattgaatgggagctgcagaaggaaaacagcaagcgctggaaccccgagatccagtacacctccaactactacaaatctacaagtgtggactttgctgttaatacagaaggcgtgtactctgaaccccgccccattggcacccgttacctcacccgtaatctgtaa

SEQ ID NO: 12530 - DNA, 2217 bp, Artificial Sequence
  source: /note="Description of Artificial Sequence: Synthetic polynucleotide"
atggctgccgatggttatcttccagattggctcgaggacaacctctctgagggcattcgcgagtggtgggcgctgaaacctggagccccgaagcccaaagccaaccagcaaaagcaggacgacggccggggtctggtgcttcctggctacaagtacctcggacccttcaacggactcgacaagggggagcccgtcaacgcggcggacgcggcggccctcgagcacgacaaggcctacgaccagcagctgcaggcgggtgacaatccgtacctgcggtataaccacgccgacgccgagtttcaggagcgtctgcaagaagatacgtcttttgggggcaacctcgggcgagcagtcttccaggccaagaagcgggttctcgaacctctcggtctggttgaggaaggcgctaagacggctcctggaaagaagagaccggtagagccatcaccccagcgttctccagactcctctacgggcatcggcaagaagggccaacagcccgccagaaaaagactcaattttggtcagactggcgactcagagtcagttccagaccctcaacctctcggagaacctccagcagcgccctctggtgtgggacctaatacaatggctgcaggcggtggcgcaccaatggcagacaataacgaaggcgccgacggagtgggtagttcctcgggaaattggcattgcgattccacatggctgggcgacagagtcatcaccaccagcacccgaacctgggccctgcccacctacaacaaccacctctacaagcaaatctccaacgggacatcgggaggagccaccaacgacaacacctacttcggctacagcaccccctgggggtattttgactttaacagattccactgccacttttcaccacgtgactggcagcgactcatcaacaacaactggggattccggcccaagagactcagcttcaagctcttcaacatccaggtcaaggaggtcacgcagaatgaaggcaccaagaccatcgccaataacctcaccggcaccatccaggtgtttacggactcggagtaccagctgccgtacgttctcggctctgcccaccagggctgcctgcctccgttcccggcggacgtgttcacgattccccagtacggctacctaacactcaacaacggtagtcaggccgtgggacgctcctccttctactgcctggaatactttccttcgcagatgctgagaaccggcaacaacttccagtttacttacaccttcgaggacgtgcctttccacagcagctacgcccacagccagagcttggaccggctgatgaatcctctgattgaccagtacctgtactacttgtctcggattcaaacaacaggaggcacggcaaatacgcagactctgggcttcagccaaggtgggcctaatacaatggccaatcaggcaaagaactggctgccaggaccctgttaccgccaacaacgcgtctcaacgacaaccgggcaaaacaacaatagcaactttgcctggactgctgggaccaaataccatctgaatggaagaaattcattggctaatcctggcatcgctatggcaacacacaaagacgacgaggagcgtttttttcccagtaacgggatcctgatttttggcaaacaaaatgctgccagagacaatgcggattacagcgatgtcatgcccaccagcgaggaagaaatcaaaaccactaaccctgtggccacagaggaatacggtatcgtggcagataacttgcagcagcaaaacacggctcctcaaattggaactgtcaacagccagggggccttacccggtatggtctggcagaaccgggacgtgtacctgcagggtcccatctgggccaagattcctcacacggacggcaacttccacccgtctccgctgatgggcggctttggcctgaaacatcctccgcctcagatcctgatcaagaacacgcctgtacctgcggatcctccgaccaccttcaaccagtcaaagctgaactctttcatcacgcaatacagcaccggacaggtcagcgtggaaattgaatgggagctgcagaaggaaaacagcaagcgctggaaccccgagatccagtacacctccaactactacaaatctacaagtgtggactttgctgttaatacagaaggcgtgtactctgaaccccgccccattggcacccgttacctcacccgtaatctgtaa

SEQ ID NO: 12531 - DNA, 2217 bp, Artificial Sequence
  source: /note="Description of Artificial Sequence: Synthetic polynucleotide"
atggctgccgatggttatcttccagattggctcgaggacaacctctctgagggcattcgcgagtggtgggcgctgaaacctggagccccgaagcccaaagccaaccagcaaaagcaggacgacggccggggtctggtgcttcctggctacaagtacctcggacccttcaacggactcgacaagggggagcccgtcaacgcggcggacgcggcggccctcgagcacgacaaggcctacgaccagcagctgcaggcgggtgacaatccgtacctgcggtataaccacgccgacgccgagtttcaggagcgtctgcaagaagatacgtcttttgggggcaacctcgggcgagcagtcttccaggccaagaagcgggttctcgaacctctcggtctggttgaggaaggcgctaagacggctcctggaaagaagagaccggtagagccatcaccccagcgttctccagactcctctacgggcatcggcaagaagggccaacagcccgccagaaaaagactcaattttggtcagactggcgactcagagtcagttccagaccctcaacctctcggagaacctccagcagcgccctctggtgtgggacctaatacaatggctgcaggcggtggcgcaccaatggcagacaataacgaaggcgccgacggagtgggtagttcctcgggaaattggcattgcgattccacatggctgggcgacagagtcatcaccaccagcacccgaacctgggccctgcccacctacaacaaccacctctacaagcaaatctccaacgggacatcgggaggagccaccaacgacaacacctacttcggctacagcaccccctgggggtattttgactttaacagattccactgccacttttcaccacgtgactggcagcgactcatcaacaacaactggggattccggcccaagagactcagcttcaagctcttcaacatccaggtcaaggaggtcacgcagaatgaaggcaccaagaccatcgccaataacctcaccagcaccatccaggtgtttacggactcggagtaccagctgccgtacgttctcggctctgcccaccagggctgcctgcctccgttcccggcggacgtgttcacgattccccagtacggctacctaacactcaacaacggtagtcaggccgtgggacgctcctccttctactgcctggaatactttccttcgcagatgctgagaaccggcaacaacttccagtttacttacaccttcgaggacgtgcctttccacagcagctacgcccacagccagagcttggaccggctgatgaatcctctgattgaccagtacctgtactacttgtctcggattcaaacaacaggaggcacggcaaatacgcagactctgggcttcagccaaggtgggcctaatacaatggccaatcaggcaaagaactggctgccaggaccctgttaccgccaacaacgcgtctcaacgacaaccgggcaaaacaacaatagcaactttgcctggactgctgggaccaaataccatctgaatggaagaaattcattggctaatcctggcatcgctatggcaacacacaaagacgacgaggagcgtttttttcccagtaacgggatcctgatttttggcaaacaaaatgctgtcagagacaatgcggattacagcgatgtcatgcccaccagcgaggaagaaatcaaaaccactaaccctgtggccacagaggaatacggtatcgtggcagataacttgcagcagcaaaacacggctcctcaaattggaactgtcaacagccagggggccttacccggtatggtctggcagaaccgggacgtgtacctgcagggtcccatctgggccaagattcctcacacggacggcaacttccacccgtctccgctgatgggcggctttggcctgaaacatcctccgcctcagatcctgatcaagaacacgcctgtacctgcggatcctccgaccaccttcaaccagtcaaagctgaactctttcatcacgcaatacagcaccggacaggtcagcgtggaaattgaatgggagctgcagaaggaaaacagcaagcgctggaaccccgagatccagtacacctccaactactacaaatctacaagtgtggactttgctgttaatacagaaggcgtgtactctgaaccccgccccattggcacccgttacctcacccgtaatctgtaa

SEQ ID NO: 12532 - DNA, 2217 bp, Artificial Sequence
  source: /note="Description of Artificial Sequence: Synthetic polynucleotide"
atggctgccgatggttatcttccagattggctcgaggacaacctctctgagggcattcgcgagtggtgggcgctgaaacctggagccccgaagcccaaagccaaccagcaaaagcaggacgacggccggggtctggtgcttcctggctacaagtacctcggacccttcaacggactcgacaagggggagcccgtcaacgcggcggacgcggcggccctcgagcacgacaaggcctacgaccagcagctgcaggcgggtgacaatccgtacctgcggtataaccacgccgacgccgagtttcaggagcgtctgcaagaagatacgtcttttgggggcaacctcgggcgagcagtcttccaggccaagaagcgggttctcgaacctctcggtctggttgaggaaggcgctaagacggctcctggaaagaagagaccggtagagccatcaccccagcgttctccagactcctctacgggcatcggcaagaagggccaacagcccgccagaaaaagactcaattttggtcagactggcgactcagagtcagttccagaccctcaacctctcggagaacctccagcagcgccctctggtgtgggacctaatacaatggctgcaggcggtggcgcaccaatggcagacaataacgaaggcgccgacggagtgggtagttcctcgggaaattggcattgcgattccacatggctgggcgacagagtcatcaccaccagcacccgaacctgggccctgcccacctacaacaaccacctctacaagcaaatctccaacgggacatcgggaggagccaccaacgacaacacctacttcggctacagcaccccctgggggtattttgactttaacagattccactgccacttttcaccacgtgactggcagcgactcatcaacaacaactggggattccggcccaagagactcagcttcaagctcttcaacatccaggtcaaggaggtcacgcagaatgaaggcaccaagaccatcgccaataacctcaccagcaccatccaggtgtttacggactcggagtaccagctgccgtacgttctcggctctgcccaccagggctgcctgcctccgttcccggcggacgtgttcacgattccccagtacggctacctaacactcaacaacggtagtcaggccgtgggacgctcctccttctactgcctggaatactttccttcgcagatgctgagaaccggcaacaacttccagtttacttacaccttcgaggacgtgcctttccacagcagctacgcccacagccagagcttggaccggctgatgaatcctctgattgaccagtacctgtactacttgtctcggattcaaacaacaggaggcacggcaaatacgcagactctgggcttcagccaaggtgggcctaatacaatggccaatcaggcaaagaactggctgccaggaccctgttaccgccaacaacgcgtctcaacgacaaccgggcaaaacaacaatagcaactttgcctggactgctgggaccaaataccatctgaatggaagaaattcattggctaatcctggcatcgctatggcaacacacaaagacgacgaggagcgtttttttcccagtaacgggatcctgatttttggcaaacaaaatgctgccagagacaatgcggattacagcgatgtcatgcccaccagcgaggaagaaatcaaaaccactaaccctgtggccacagaggaatacggtatcgtggcagataacttgcagcagcaaaacacggctcctcaaattggaactgtcaacagccagggggccttacccggtatggtctggcagaaccgggacgtgtacctgcagggtcccatctgggccaagattcctcacacggacggcaacttccacccgtctccgctgatgggcggctttggcctgaaacatcctccgcctcagatcctgatcaagaacacgcctgtacctgcggatcctccgaccaccttcaaccagtcaaagctgaactctttcatcgcgcaatacagcaccggacaggtcagcgtggaaattgaatgggagctgcagaaggaaaacagcaagcgctggaaccccgagatccagtacacctccaactactacaaatctacaagtgtggactttgctgttaatacagaaggcgtgtactctgaaccccgccccattggcacccgttacctcacccgtaatctgtaa

SEQ ID NO: 12533 - DNA, 2217 bp, Artificial Sequence
  source: /note="Description of Artificial Sequence: Synthetic polynucleotide"
atggctgccgatggttatcttccagattggctcgaggacaacctctctgagggcattcgcgagtggtgggcgctgaaacctggagccccgaagcccaaagccaaccagcaaaagcaggacgacggccggggtctggtgcttcctggctacaagtacctcggacccttcaacggactcgacaagggggagcccgtcaacgcggcggacgcggcggccctcgagcacgacaaggcctacgaccagcagctgcaggcgggtgacaatccgtacctgcggtataaccacgccgacgccgagtttcaggagcgtctgcaagaagatacgtcttttgggggcaacctcgggcgagcagtcttccaggccaagaagcgggttctcgaacctctcggtctggttgaggaaggcgctaagacggctcctggaaagaagagaccggtagagccatcaccccagcgttctccagactcctctacgggcatcggcaagaagggccaacagcccgccagaaaaagactcaattttggtcagactggcgactcagagtcagttccagaccctcaacctctcggagaacctccagcagcgccctctggtgtgggacctaatacaatggctgcaggcggtggcgcaccaatggcagacaataacgaaggcgccgacggagtgggtagttcctcgggaaattggcattgcgattccacatggctgggcgacagagtcatcaccaccagcacccgaacctgggccctgcccacctacaacaaccacctctacaagcaaatctccaacgggacatcgggaggagccaccaacgacaacacctacttcggctacagcaccccctgggggtattttgactttaacagattccactgccacttttcaccacgtgactggcagcgactcatcaacaacaactggggattccggcccaagagactcagcttcaagctcttcaacatccaggtcaaggaggtcacgcagaatgaaggcaccaagaccatcgccaataacctcaccagcaccatccaggtgtttacggactcggagtaccagctgccgtacgttctcggctctgcccaccagggctgcctgcctccgttcccggcggacgtgttcacgattccccagtacggctacctaacactcaacaacggtagtcaggccgtgggacgctcctccttctactgcctggaatactttccttcgcagatgctgagaaccggcaacaacttccagtttacttacaccttcgaggacgtgcctttccacagcagctacgcccacagccagagcttggaccggctgatgaatcctctgattgaccagtacctgtactacttgtctcggattcaaacaacaggaggcacggcaaatacgcagactctgggcttcagccaaggtgggcctaatacaatggccaatcaggcaaagaactggctgccaggaccctgttaccgccaacaacgcgtctcaacgacaaccgggcaaaacaacaatagcaactttgcctggactgctgggaccaaataccatctgaatggaagaaattcattggctaatcctggcatcgctatggcaacacacaaagacggcgaggagcgtttttttcccagtaacgggatcctgatttttggcaaacaaaatgctgccagagacaatgcggattacagcgatgtcatgcccaccagcgaggaagaaatcaaaaccactaaccctgtggccacagaggaatacggtatcgtggcagataacttgcagcagcaaaacacggctcctcaaattggaactgtcaacagccagggggccttacccggtatggtctggcagaaccgggacgtgtacctgcagggtcccatctgggccaagattcctcacacggacggcaacttccacccgtctccgctgatgggcggctttggcctgaaacatcctccgcctcagatcctgatcaagaacacgcctgtacctgcggatcctccgaccaccttcaaccagtcaaagctgaactctttcatcacgcaatacagcaccggacaggtcagcgtggaaattgaatgggagctgcagaaggaaaacagcaagcgctggaaccccgagatccagtacacctccaactactacaaatctacaagtgtggactttgctgttaatacagaaggcgtgtactctgaaccccgccccattggcacccgttacctcacccgtaatctgtaa

SEQ ID NO: 12534 - DNA, 2217 bp, Artificial Sequence
  source: /note="Description of Artificial Sequence: Synthetic polynucleotide"
atggctgccgatggttatcttccagattggctcgaggacaacctctctgagggcattcgcgagtggtgggcgctgaaacctggagccccgaagcccaaagccaaccagcaaaagcaggacgacggccggggtctggtgcttcctggctacaagtacctcggacccttcaacggactcgacaagggggagcccgtcaacgcggcggacgcggcggccctcgagcacgacaaggcctacgaccagcagctgcaggcgggtgacaatccgtacctgcggtataaccacgccgacgccgagtttcaggagcgtctgcaagaagatacgtcttttgggggcaacctcgggcgagcagtcttccaggccaagaagcgggttctcgaacctctcggtctggttgaggaaggcgctaagacggctcctggaaagaagagaccggtagagccatcaccccagcgttctccagactcctctacgggcatcggcaagaagggccaacagcccgccagaaaaagactcaattttggtcagactggcgactcagagtcagttccagaccctcaacctctcggagaacctccagcagcgccctctggtgtgggacctaatacaatggctgcaggcggtggcgcaccaatggcagacaataacgaaggcgccgacggagtgggtagttcctcgggaaattggcattgcgattccacatggctgggcgacagagtcatcaccaccagcacccgaacctgggccctgcccacctacaacaaccacctctacaagcaaatctccaacgggacatcgggaggagccaccaacgacaacacctacttcggctacagcaccccctgggggtattttgactttaacagattccactgccacttttcaccacgtgactggcagcgactcatcaacaacaactggggattccggcccaagagactcagcttcaagctcttcaacatccaggtcaaggaggtcacgcagaatgaaggcaccaagaccatcgccaataacctcaccagcaccatccaggtgtttacggactcggagtaccagctgccgtacgttctcggctctgcccaccagggctgcctgcctccgttcccggcggacgtgttcacgattccccagtacggctacctaacactcaacaacggtagtcaggccgtgggacgctcctccttctactgcctggaatactttccttcgcagatgctgagaaccggcaacaacttccagtttacttacaccttcgaggacgtgcctttccacagcagctacgcccacagccagagcttggaccggctgatgaatcctctgattgaccagtacctgtactacttgtctcggattcaaacaacaggaggcacggcaaatacgcagactctgggcttcagccaaggtgggcctaatacaatggccaatcaggcaaagaactggctgccaggaccctgttaccgccaacaacgcgtctcaacgacaaccgggcaaaacaacaatagcaactttgcctggactgctgggaccaaataccatctgaatggaagaaattcattggctaatcctggcatcgctatggcaacacacaaaggcgacgaggagcgtttttttcccagtaacgggatcctgatttttggcaaacaaaatgctgccagagacaatgcggattacagcgatgtcatgcccaccagcgaggaagaaatcaaaaccactaaccctgtggccacagaggaatacggtatcgtggcagataacttgcagcagcaaaacacggctcctcaaattggaactgtcaacagccagggggccttacccggtatggtctggcagaaccgggacgtgtacctgcagggtcccatctgggccaagattcctcacacggacggcaacttccacccgtctccgctgatgggcggctttggcctgaaacatcctccgcctcagatcctgatcaagaacacgcctgtacctgcggatcctccgaccaccttcaaccagtcaaagctgaactctttcatcacgcaatacagcaccggacaggtcagcgtggaaattgaatgggagctgcagaaggaaaacagcaagcgctggaaccccgagatccagtacacctccaactactacaaatctacaagtgtggactttgctgttaatacagaaggcgtgtactctgaaccccgccccattggcacccgttacctcacccgtaatctgtaa

SEQ ID NO: 12535 - DNA, 2217 bp, Artificial Sequence
  source: /note="Description of Artificial Sequence: Synthetic polynucleotide"
atggctgccgatggttatcttccagattggctcgaggacaacctctctgagggcattcgcgagtggtgggcgctgaaacctggagccccgaagcccaaagccaaccagcaaaagcaggacgacggccggggtctggtgcttcctggctacaagtacctcggacccttcaacggactcgacaagggggagcccgtcaacgcggcggacgcggcggccctcgagcacgacaaggcctacaaccagcagctgcaggcgggtgacaatccgtacctgcggtataaccacgccgacgccgagtttcaggagcgtctgcaagaagatacgtcttttgggggcaacctcgggcgagcagtcttccaggccaagaagcgggttctcgaacctctcggtctggttgaggaaggcgctaagacggctcctggaaagaagagaccggtagagccatcaccccagcgttctccagactcctctacgggcatcggcaagaagggccaacagcccgccagaaaaagactcaattttggtcagactggcgactcagagtcagttccagaccctcaacctctcggagaacctccagcagcgccctctggtgtgggacctaatacaatggctgcaggcggtggcgcaccaatggcagacaataacgaaggcgccgacggagtgggtagttcctcgggaaattggcattgcgattccacatggctgggcgacagagtcatcaccaccagcacccgaacctgggccctgcccacctacaacaaccacctctacaagcaaatctccaacgggacatcgggaggagccaccaacgacaacacctacttcggctacagcaccccctgggggtattttgactttaacagattccactgccacttttcaccacgtgactggcagcgactcatcaacaacaactggggattccggcccaagagactcagcttcaagctcttcaacatccaggtcaaggaggtcacgcagaatgaaggcaccaagaccatcgccaataacctcaccagcaccatccaggtgtttacggactcggagtaccagctgccgtacgttctcggctctgcccaccagggctgcctgcctccgttcccggcggacgtgttcacgattccccagtacggctacctaacactcaacaacggtagtcaggccgtgggacgctcctccttctactgcctggaatactttccttcgcagatgctgagaaccggcaacaacttccagtttacttacaccttcgaggacgtgcctttccacagcagctacgcccacagccagagcttggaccggctgatgaatcctctgattgaccagtacctgtactacttgtctcggattcaaacaacaggaggcacggcaaatacgcagactctgggcttcagccaaggtgggcctaatacaatggccaatcaggcaaagaactggctgccaggaccctgttaccgccaacaacgcgtctcaacgacaaccgggcaaaacaacaatagcaactttgcctggactgctgggaccaaataccatctgaatggaagaaattcattggctaatcctggcatcgctatggcaacacacaaagacgacgaggagcgtttttttcccagtaacgggatcctgatttttggcaaacaaaatgctgccagagacaatgcggattacagcgatgtcatgcccaccagcgaggaagaaatcaaaaccactaaccctgtggccacagaggaatacggtatcgtggcagataacttgcagcagcaaaacacggctcctcaaattggaactgtcaacagccagggggccttacccggtatggtctggcagaaccgggacgtgtacctgcagggtcccatctgggccaagattcctcacacggacggcaacttccacccgtctccgctgatgggcggctttggcctgaaacatcctccgcctcagatcctgatcaagaacacgcctgtacctgcggatcctccgaccaccttcaaccagtcaaagctgaactctttcatcacgcaatacagcaccggacaggtcagcgtggaaattgaatgggagctgcagaaggaaaacagcaagcgctggaaccccgagatccagtacacctccaactactacaaatctacaagtgtggactttgctgttaatacagaaggcgtgtactctgaaccccgccccattggcacccgttacctcacccgtaatctgtaa

SEQ ID NO: 12536 - DNA, 2217 bp, Artificial Sequence
  source: /note="Description of Artificial Sequence: Synthetic polynucleotide"
atggctgccgatggttatcttccagattggctcgaggacaacctctctgagggcattcgcgagtggtgggcgctgaaacctggagccccgaagcccaaagccaaccagcaaaagcaggacgacggccggggtctggtgcttcctggctacaagtacctcggacccttcaacggactcgacaagggggagcccgtcaacgcggcggacgcggcggccctcgagcacgacaaggcctacgaccagcagctgcaggcgggtgacaatccgtacctgcggtataaccacgccgacgccgagtttcaggagcgtctgcaagaagatacgtcttttgggggcaacctcgggcgagcagtcttccaggccaagaagcgggttctcgaacctctcggtctggttgaggaaggcgctaagacggctcctggaaagaagagaccggtagagccatcaccccagcgttctccagactcctctacgggcatcggcaagaagggccaacagcccgccagaaaaagactcaattttggtcagactggcgactcagagtcagttccagaccctcaacctctcggagaacctccagcagcgccctctggtgtgggacctaatacaatggctgcaggcggtggcgcaccaatggcagacaataacgaaggcgccgacggagtgggtagttcctcgggaaattggcattgcgattccacatggctgggcgacagagtcatcaccaccagcacccgaacctgggccctgcccacctacaacaaccacctctacaagcaaatctccaacgggacatcgggaggagccaccaacgacaacacctacttcggctacagcaccccctgggggtattttgactttaacagattccactgccacttttcaccacgtgactggcagcgactcatcaacaacaactggggattccggcccaagagactcagcttcaagctcttcaacatccaggtcaaggaggtcacgcagaatgaaggcaccaagaccatcgccaataacctcaccagcaccatccaggtgtttacggactcggagtaccagctgccgtacgttctcggctctgcccaccagggctgcctgcctccgttcccggcggacgtgttcacgattccccagtacggctacctaacactcaacaacggtagtcaggccgtgggacgctcctccttctactgcctggaatactttccttcgcagatgctgagaaccggcaacaacttccagtttacttacaccttcgaggacgtgcctttccacagcagctacgcccacagccagagcttggaccggctgatgaatcctctgattgaccagtacctgtactacttgtctcggattcaaacaacaggaggcacggcaaatacgcagactctgggcttcagccaaggtgggcctaatacaatggccaatcaggcaaagaactggctgccaggaccctgttaccgccaacaacgcgtctcaacgacaaccgggcaaaacaacaatagcaactttgcctggactgctgggaccaaataccatctgaatggaagaaattcattggctaatcctggcatcgctatggcaacacacaaagacgacgaggagcgtttttttcccagtaacgggatcctgatttttggcaaacaaaatgctgccagagacaatgcggattacagcgatgtcatgcccaccagcgaggaagaaatcaaaaccactaaccctgtggccacagaggaatacggtatcgtggcagataacttgcagcagcaaaacacggctcctcaaattggaactgtcaacagccagggggccttacccggtatggtctggcagaaccgggacgtgtacctgcagggtcccacctgggccaagattcctcacacggacggcaacttccacccgtctccgctgatgggcggctttggcctgaaacatcctccgcctcagatcctgatcaagaacacgcctgtacctgcggatcctccgaccaccttcaaccagtcaaagctgaactctttcatcacgcaatacagcaccggacaggtcagcgtggaaattgaatgggagctgcagaaggaaaacagcaagcgctggaaccccgagatccagtacacctccaactactacaaatctacaagtgtggactttgctgttaatacagaaggcgtgtactctgaaccccgccccattggcacccgttacctcacccgtaatctgtaa

SEQ ID NO: 12537 - DNA, 2217 bp, Artificial Sequence
  source: /note="Description of Artificial Sequence: Synthetic polynucleotide"
atggctgccgatggttatcttccagattggctcgaggacaacctctctgagggcattcgcgagtggtgggcgctgaaacctggagccccgaagcccaaagccaaccagcaaaagcaggacgacggccggggtctggtgcttcctggctacaagtacctcggacccttcaacggactcgacaagggggagcccgtcaacgcggcggacgcggcggccctcgagcacgacaaggcctacgaccagcagctgcaggcgggtgacaatccgtacctgcggtataaccacgccgacgccgagtttcaggagcgtctgcaagaagatacgtcttttgggggcaacctcgggcgagcagtcttccaggccaagaagcgggttctcgaacctctcggtctggttgaggaaggcgctaagacggctcctggaaagaagagaccggtagagccatcaccccagcgttctccagactcctctacgggcatcggcaagaagggccaacagcccgccagaaaaagactcaattttggtcagactggcgactcagagtcagttccagaccctcaacctctcggagaacctccagcagcgccctctggtgtgggacctaatacaatggctgcaggcggtggcgcaccaatggcagacaataacgaaggcgccgacggagtgggtagttcctcgggaaattggcattgcgattccacatggctgggcgacagagtcatcaccaccagcacccgaacctgggccctgcccacctacaacaaccacctctacaagcaaatctccaacgggacatcgggaggagccaccaacgacaacacctacttcggctacagcaccccctgggggtattttgactttaacagattccactgccacttttcaccacgtgactggcagcgactcatcaacaacaactggggattccggcccaagagactcagcttcaagctcttcaacatccaggtcaaggaggtcacgcagaatgaaggcaccaagaccatcgccaataacctcaccagcaccatccaggtgtttacggactcggagtaccagctgccgtacgttctcggctctgcccaccagggctgcctgcctccgttcccggcggacgtgttcacgattccccagtacggctacctaacactcaacaacggtagtcaggccgtgggacgctcctccttctactgcctggaatactttccttcgcagatgctgagaaccggcaacaacttccagtttacttacaccttcgaggacgtgcctttccacagcagctacgcccacagccagagcttggaccggctgatgaatcctctgattgaccagtacctgtactacttgtctcggattcaaacaacaggaggcacggcaaatacgcagactctgggcttcagccaaggtgggcctaatacaatggccaatcaggcaaagaactggctgccaggaccctgttaccgccaacaacgcgtctcaacgacaaccgggcaaaacaacaatagcaactttgcctggactgctgggaccaaataccatctgaatggaagaaattcattggctaatcctggcatcgctatggcaacacacaaagacgacgaggagcgtttttttcccagtaacgggatcctgatttttggcaaacaaaatgctgccagagacaatgcggattacagcgatgtcatgcccaccagcgaggaagaaatcaaaaccactaaccctgtggccacagaggaatacggtatcgtggcagataacttgcggcagcaaaacacggctcctcaaattggaactgtcaacagccagggggccttacccggtatggtctggcagaaccgggacgtgtacctgcagggtcccatctgggccaagattcctcacacggacggcaacttccacccgtctccgctgatgggcggctttggcctgaaacatcctccgcctcagatcctgatcaagaacacgcctgtacctgcggatcctccgaccaccttcaaccagtcaaagctgaactctttcatcacgcaatacagcaccggacaggtcagcgtggaaattgaatgggagctgcagaaggaaaacagcaagcgctggaaccccgagatccagtacacctccaactactacaaatctacaagtgtggactttgctgttaatacagaaggcgtgtactctgaaccccgccccattggcacccgttacctcacccgtaatctgtaa

SEQ ID NO: 12538 - DNA, 2217 bp, Artificial Sequence
  source: /note="Description of Artificial Sequence: Synthetic polynucleotide"
atggctgccgatggttatcttccagattggctcgaggacaacctctctgagggcattcgcgagtggtgggcgctgaaacctggagccccgaagcccaaagccaaccagcaaaagcaggacgacggccggggtctggtgcttcctggctacaagtacctcggacccttcaacggactcgacaagggggagcccgtcaacgcggcggacgcggcggccctcgagcacgacaaggcctacgaccagcagctgcaggcgggtgacaatccgtacctgcggtataaccacgccgacgccgagtttcaggagcgtctgcaagaagatacgtcttttgggggcaacctcgggcgagcagtcttccaggccaagaagcgggttctcgaacctctcggtctggttgaggaaggcgctaagacggctcctggaaagaagagaccggtagagccatcaccccagcgttctccagactcctctacgggcatcggcaagaagggccaacagcccgccagaaaaagactcaattttggtcagactggcgactcagagtcagttccagaccctcaacctctcggagaacctccagcagcgccctctggtgtgggacctaatacaatggctgcaggcggtggcgcaccaatggcagacaataacgaaggcgccgacggagtgggtagttcctcgggaaattggcattgcgattccacatggctgggcgacagagtcatcaccaccagcacccgaacctgggccctgcccacctacaacaaccacctctacaagcaaatctccaacgggacatcgggaggagccaccaacgacaacacctacttcggctacagcaccccctgggggtattttgactttaacagattccactgccacttttcaccacgtgactggcagcgactcatcaacaacaactggggattccggcccaagagactcagcttcaagctcttcaacatccaggtcaaggaggtcacgcagaatgaaggcaccaagaccatcgccaataacctcaccagcaccatccaggtgtttacggactcggagtaccagctgccgtacgttctcggctctgcccaccagggctgcctgcctccgttcccggcggacgtgttcacgattccccagtacggctacctaacactcaacaacggtagtcaggccgtgggacgctcctccttctactgcctggaatactttccttcgcagatgctgagaaccggcaacaacttccagtttacttacaccttcgaggacgtgcctttccacagcagctacgcccacagccagagcttggaccggctgatgaatcctctgattgaccagtacctgtactacttgtctcggattcaaacaacaggaggcacggcaaatacgcagactctgggcttcagccaaggtgggcctaatacaatggccaatcaggcaaagaactggctgccaggaccctgttaccgccaacaacgcgtctcaacgacaaccgggcaaaacaacaatagcaactttgcctggactgctgggaccaaataccatctgaatggaagaaattcattggctaatcctggcatcgctatggcaacacacaaagacgacgaggagcgtttttttcccagtaacgggatcctgatttttggcaaacaaaatgctgccagagacaatgcggattacagcgatgccatgcccaccagcgaggaagaaatcaaaaccactaaccctgtggccacagaggaatacggtatcgtggcagataacttgcagcagcaaaacacggctcctcaaattggaactgtcaacagccagggggccttacccggtatggtctggcagaaccgggacgtgtacctgcagggtcccatctgggccaagattcctcacacggacggcaacttccacccgtctccgctgatgggcggctttggcctgaaacatcctccgcctcagatcctgatcaagaacacgcctgtacctgcggatcctccgaccaccttcaaccagtcaaagctgaactctttcatcacgcaatacagcaccggacaggtcagcgtggaaattgaatgggagctgcagaaggaaaacagcaagcgctggaaccccgagatccagtacacctccaactactacaaatctacaagtgtggactttgctgttaatacagaaggcgtgtactctgaaccccgccccattggcacccgttacctcacccgtaatctgtaa

SEQ ID NO: 12539 - DNA, 2217 bp, Artificial Sequence
  source: /note="Description of Artificial Sequence: Synthetic polynucleotide"
atggctgccgatggttatcttccagattggctcgaggacaacctctctgagggcattcgcgagtggtgggcgctgaaacctggagccccgaagcccaaagccaaccagcaaaagcaggacgacggccggggtctggtgcttcctggctacaagtacctcggacccttcaacggactcgacaagggggagcccgtcaacgcggcggacgcggcggccctcgagcacgacaaggcctacgaccagcagctgcaggcgggtgacaatccgtacctgcggtataaccacgccgacgccgagtttcaggagcgtctgcaagaagatacgtcttttgggggcaacctcgggcgagcagtcttccaggccaagaagcgggttctcgaacctctcggtctggttgaggaaggcgctaagacggctcctggaaagaagagaccggtagagccatcaccccagcgttctccagactcctctacgggcatcggcaagaagggccaacagcccgccagaaaaagactcaattttggtcagactggcgactcagagtcagttccagaccctcaacctctcggagaacctccagcagcgccctctggtgtgggacctaatacaatggctgcaggcggtggcgcaccaatggcagacaataacgaaggcgccgacggagtgggtagttcctcgggaaattggcattgcgattccacatggctgggcgacagagtcatcaccaccagcacccgaacctgggccctgcccacctacaacaaccacctctacaagcaaatctccaacgggacatcgggaggagccaccaacggcaacacctacttcggctacagcaccccctgggggtattttgactttaacagattccactgccacttttcaccacgtgactggcagcgactcatcaacaacaactggggattccggcccaagagactcagcttcaagctcttcaacatccaggtcaaggaggtcacgcagaatgaaggcaccaagaccatcgccaataacctcaccagcaccatccaggtgtttacggactcggagtaccagctgccgtacgttctcggctctgcccaccagggctgcctgcctccgttcccggcggacgtgttcacgattccccagtacggctacctaacactcaacaacggtagtcaggccgtgggacgctcctccttctactgcctggaatactttccttcgcagatgctgagaaccggcaacaacttccagtttacttacaccttcgaggacgtgcctttccacagcagctacgcccacagccagagcttggaccggctgatgaatcctctgattgaccagtacctgtactacttgtctcggattcaaacaacaggaggcacggcaaatacgcagactctgggcttcagccaaggtgggcctaatacaatggccaatcaggcaaagaactggctgccaggaccctgttaccgccaacaacgcgtctcaacgacaaccgggcaaaacaacaatagcaactttgcctggactgctgggaccaaataccatctgaatggaagaaattcattggctaatcctggcatcgctatggcaacacacaaagacgacgaggagcgtttttttcccagtaacgggatcctgatttttggcaaacaaaatgctgccagagacaatgcggattacagcgatgtcatgcccaccagcgaggaagaaatcaaaaccactaaccctgtggccacagaggaatacggtatcgtggcagataacttgcagcagcaaaacacggctcctcaaattggaactgtcaacagccagggggccttacccggtatggtctggcagaaccgggacgtgtacctgcagggtcccatctgggccaagattcctcacacggacggcaacttccacccgtctccgctgatgggcggctttggcctgaaacatcctccgcctcagatcctgatcaagaacacgcctgtacctgcggatcctccgaccaccttcaaccagtcaaagctgaactctttcatcacgcaatacagcaccggacaggtcagcgtggaaattgaatgggagctgcagaaggaaaacagcaagcgctggaaccccgagatccagtacacctccaactactacaaatctacaagtgtggactttgctgttaatacagaaggcgtgtactctgaaccccgccccattggcacccgttacctcacccgtaatctgtaa

SEQ ID NO: 12540 - DNA, 2217 bp, Artificial Sequence
  source: /note="Description of Artificial Sequence: Synthetic polynucleotide"
atggctgccgatggttatcttccagattggctcgaggacaacctctctgagggcattcgcgagtggtgggcgctgaaacctggagccccgaagcccaaagccaaccagcaaaagcaggacgacggccggggtctggtgcttcctggctacaagtacctcggacccttcaacggactcgacaagggggagcccgtcaacgcggcggacgcggcggccctcgagcacgacaaggcctacgaccagcagctgcaggcgggtgacaatccgtacctgcggtataaccacgccgacgccgagtttcaggagcgtctgcaagaagatacgtcttttgggggcaacctcgggcgagcagtcttccaggccaagaagcgggttctcgaacctctcggtctggttgaggaaggcgctaagacggctcctggaaagaagagaccggtagagccatcaccccagcgttctccagactcctctacgggcatcggcaagaagggccaacagcccgccagaaaaagactcaattttggtcagactggcgactcagagtcagttccagaccctcaacctctcggagaacctccagcagcgccctctggtgtgggacctaatacaatggctgcaggcggtggcgcaccaatggcagacaataacgaaggcgccgacggagtgggtagttcctcgggaaattggcattgcgattccacatggctgggcgacagagtcatcaccaccagcacccgaacctgggccctgcccacctacaacaaccacctctacaagcaaatctccaacgggacatcgggaggagccaccaacgacaacacctacttcggctacagcaccccctgggggtattttgactttaacagattccactgccacttttcaccacgtgactggcagcgactcatcaacaacaactggggattccggcccaagagactcagcttcaagctcttcaacatccaggtcaaggaggtcgcgcagaatgaaggcaccaagaccatcgccaataacctcaccagcaccatccaggtgtttacggactcggagtaccagctgccgtacgttctcggctctgcccaccagggctgcctgcctccgttcccggcggacgtgttcacgattccccagtacggctacctaacactcaacaacggtagtcaggccgtgggacgctcctccttctactgcctggaatactttccttcgcagatgctgagaaccggcaacaacttccagtttacttacaccttcgaggacgtgcctttccacagcagctacgcccacagccagagcttggaccggctgatgaatcctctgattgaccagtacctgtactacttgtctcggattcaaacaacaggaggcacggcaaatacgcagactctgggcttcagccaaggtgggcctaatacaatggccaatcaggcaaagaactggctgccaggaccctgttaccgccaacaacgcgtctcaacgacaaccgggcaaaacaacaatagcaactttgcctggactgctgggaccaaataccatctgaatggaagaaattcattggctaatcctggcatcgctatggcaacacacaaagacgacgaggagcgtttttttcccagtaacgggatcctgatttttggcaaacaaaatgctgccagagacaatgcggattacagcgatgtcatgcccaccagcgaggaagaaatcaaaaccactaaccctgtggccacagaggaatacggtatcgtggcagataacttgcagcagcaaaacacggctcctcaaattggaactgtcaacagccagggggccttacccggtatggtctggcagaaccgggacgtgtacctgcagggtcccatctgggccaagattcctcacacggacggcaacttccacccgtctccgctgatgggcggctttggcctgaaacatcctccgcctcagatcctgatcaagaacacgcctgtacctgcggatcctccgaccaccttcaaccagtcaaagctgaactctttcatcacgcaatacagcaccggacaggtcagcgtggaaattgaatgggagctgcagaaggaaaacagcaagcgctggaaccccgagatccagtacacctccaactactacaaatctacaagtgtggactttgctgttaatacagaaggcgtgtactctgaaccccgccccattggcacccgttacctcacccgtaatctgtaa

SEQ ID NO: 12541 - DNA, 2217 bp, Artificial Sequence
  source: /note="Description of Artificial Sequence: Synthetic polynucleotide"
atggctgccgatggttatcttccagattggctcgaggacaacctctctgagggcattcgcgagtggtgggcgctgaaacctggagccccgaagcccaaagccaaccagcaaaagcaggacgacggccggggtctggtgcttcctggctacaagtacctcggacccttcaacggactcgacaagggggagcccgtcaacgcggcggacgcggcggccctcgagcacgacaaggcctacgaccagcagctgcaggcgggtgacaatccgtacctgcggtataaccacgccgacgccgagtttcaggagcgtctgcaagaagatacgtcttttgggggcaacctcgggcgagcagtcttccaggccaagaagcgggttctcgaacctctcggtctggttgaggaaggcgctaagacggctcctggaaagaagagaccggtagagccatcaccccagcgttctccagactcctctacgggcatcggcaagaagggccaacagcccgccagaaaaagactcaattttggtcagactggcgactcagagtcagttccagaccctcaacctctcggagaacctccagcagcgccctctggtgtgggacctaatacaatggctgcaggcggtggcgcaccaatggcagacaataacgaaggcgccgacggagtgggtagttcctcgggaaattggcattgcgattccacatggctgggcgacagagtcatcaccaccagcacccgaacctgggccctgcccacctacaacaaccacctctacaagcaaatctccaacgggacatcgggaggagccaccaacgacaacacctacttcggctacagcaccccctgggggtattttgactttaacagattccactgccacttttcaccacgtgactggcagcgactcatcaacaacaactggggattccggcccaagagactcagcttcaagctcttcaacatccaggtcaaggaggtcacgcagaatgaaggcaccaagaccatcgccaataacctcaccagcaccatccaggtgtttacggactcggagtaccagctgccgtacgttctcggctctgcccaccagggctgcctgcctccgttcccggcggacgtgttcacgattccccagtacggctacctaacactcaacaacggtagtcaggccgtgggacgctcctccttctactgcctggaatactttccttcgcagatgctgagaaccggcaacaacttccagtttacttacaccttcgaggacgtgcctttccacagcagctacgcccacagccagagcttggaccggctgatgaatcctctgattgaccagtacctgtactacttgtctcggattcaaacaacaggaggcacggcaaatacgcagactctgggcttcagccaaggtgggcctaatacaatggccaatcaggcaaagaactggctgccaggaccctgttaccgccaacaacgcgtctcaacgacaaccgggcaaaacaacaatagcaactttgcctggactgctgggaccaaataccatctgaatggaagaaattcattggctaatcctggcatcgctatggcaacacacaaagacgacgaggagcgtttttttcccagtaacgggatcctgatttttggcaaacaaaatgctgccagagacaatgcggattacagcgatgtcatgcccaccagcgaggaagaaatcaaaaccactaaccctgtggccacagaggaatacggtatcgtggcagataacttgcagcagcaaaacacggctcctcaaattggaactgtcaacagccagggggccttacccggtatggtctggcagaaccgggacgtgtacctgcagggtcccatctgggccaagattcctcacacggacggcaacttccacccgtctccgctgatgggcggctttggcctgaaacatcctccgcctcagatcctgatcaagaacacgcctgtacctgcggatcctccgaccaccttcaaccagtcaaagctgaactctttcatcacgcaatacagcaccggacaggtcagcgcggaaattgaatgggagctgcagaaggaaaacagcaagcgctggaaccccgagatccagtacacctccaactactacaaatctacaagtgtggactttgctgttaatacagaaggcgtgtactctgaaccccgccccattggcacccgttacctcacccgtaatctgtaa

SEQ ID NO: 12542 - DNA, 2217 bp, Artificial Sequence
  source: /note="Description of Artificial Sequence: Synthetic polynucleotide"
atggctgccgatggttatcttccagattggctcgaggacaacctctctgagggcattcgcgagtggtgggcgctgaaacctggagccccgaagcccaaagccaaccagcaaaagcaggacgacggccggggtctggtgcttcctggctacaagtacctcggacccttcaacggactcgacaagggggagcccgtcaacgcggcggacgcggcggccctcgagcacgacaaggcctacgaccagcagctgcaggcgggtgacaatccgtacctgcggtataaccacgccgacgccgagtttcaggagcgtctgcaagaagatacgtcttttgggggcaacctcgggcgagcagtcttccaggccaagaagcgggttctcgaacctctcggtctggttgaggaaggcgctaagacggctcctggaaagaagagaccggtagagccatcaccccagcgttctccagactcctctacgggcatcggcaagaagggccaacagcccgccagaaaaagactcaattttggtcagactggcgactcagagtcagttccagaccctcaacctctcggagaacctccagcagcgccctctggtgtgggacctaatacaatggctgcaggcggtggcgcaccaatggcagacaataacgaaggcgccgacggagtgggtagttcctcgggaaattggcattgcgattccacatggctgggcgacagagtcatcaccaccagcacccgaacctgggccctgcccacctacaacaaccacctctacaagcaaatctccaacgggacatcgggaggagccaccaacgacaacacctacttcggctacagcaccccctgggggtattttgactttaacagattccactgccacttttcaccacgtgactggcagcgactcatcaacaacaactggggattccggcccaagagactcagcttcaagctcttcaacatccaggtcaaggaggtcacgcagaatgaaggcaccaagaccatcgccaataacctcaccagcaccatccaggtgtttacggactcggagtaccagctgccgtacgttctcggctctgcccaccagggctgcctgcctccgttcccggcggacgtgttcacgattccccagtacggctacctaacactcaacaacggtagtcaggccgtgggacgctcctccttctactgcctggaatactttccttcgcagatgctgagaaccggcaacaacttccagtttacttacaccttcgaggacgtgcctttccacagcagctacgcccacagccagggcttggaccggctgatgaatcctctgattgaccagtacctgtactacttgtctcggattcaaacaacaggaggcacggcaaatacgcagactctgggcttcagccaaggtgggcctaatacaatggccaatcaggcaaagaactggctgccaggaccctgttaccgccaacaacgcgtctcaacgacaaccgggcaaaacaacaatagcaactttgcctggactgctgggaccaaataccatctgaatggaagaaattcattggctaatcctggcatcgctatggcaacacacaaagacgacgaggagcgtttttttcccagtaacgggatcctgatttttggcaaacaaaatgctgccagagacaatgcggattacagcgatgtcatgcccaccagcgaggaagaaatcaaaaccactaaccctgtggccacagaggaatacggtatcgtggcagataacttgcagcagcaaaacacggctcctcaaattggaactgtcaacagccagggggccttacccggtatggtctggcagaaccgggacgtgtacctgcagggtcccatctgggccaagattcctcacacggacggcaacttccacccgtctccgctgatgggcggctttggcctgaaacatcctccgcctcagatcctgatcaagaacacgcctgtacctgcggatcctccgaccaccttcaaccagtcaaagctgaactctttcatcacgcaatacagcaccggacaggtcagcgtggaaattgaatgggagctgcagaaggaaaacagcaagcgctggaaccccgagatccagtacacctccaactactacaaatctacaagtgtggactttgctgttaatacagaaggcgtgtactctgaaccccgccccattggcacccgttacctcacccgtaatctgtaa

SEQ ID NO: 12543 - DNA, 2217 bp, Artificial Sequence
  source: /note="Description of Artificial Sequence: Synthetic polynucleotide"
atggctgccgatggttatcttccagattggctcgaggacaacctctctgagggcattcgcgagtggtgggcgctgaaacctggagccccgaagcccaaagccaaccagcaaaagcaggacgacggccggggtctggtgcttcctggctacaagtacctcggacccttcaacggactcgacaagggggagcccgtcaacgcggcggacgcggcggccctcgagcacgacaaggcctacgaccagcagctgcaggcgggtgacaatccgtacctgcggtataaccacgccgacgccgagtttcaggagcgtctgcaagaagatacgtcttttgggggcaacctcgggcgagcagtcttccaggccaagaagcgggttctcgaacctctcggtctggttgaggaaggcgctaagacggctcctggaaagaagagaccggtagagccatcaccccagcgttctccagactcctctacgggcatcggcaagaagggccaacagcccgccagaaaaagactcaattttggtcagactggcgactcagagtcagttccagaccctcaacctctcggagaacctccagcagcgccctctggtgtgggacctaatacaatggctgcaggcggtggcgcaccaatggcagacaataacgaaggcgccgacggagtgggtagttcctcgggaaattggcattgcgattccacatggctgggcgacagagtcatcaccaccagcacccgaacctgggccctgcccacctacaacaaccacctctacaagcaaatctccaacgggacatcgggaggagccaccaacgacaacacctacttcggctacagcaccccctgggggtattttgactttaacagattccactgccacttttcaccacgtgactggcagcgactcatcaacaacaactggggattccggcccaagagactcagcttcaagctcttcaacatccaggtcaaggaggtcacgcagaatgaaggcaccaagaccatcgccaataacctcaccagcaccatccaggtgtttacggactcggagtaccagctgccgtacgttctcggctctgcccaccagggctgcctgcctccgttcccggcggacgtgttcacgattccccagtacggctacctaacactcaacaacggtagtcaggccgtgggacgctcctccttctactgcctggaatactttccttcgcagatgctgagaaccggcagcaacttccagtttacttacaccttcgaggacgtgcctttccacagcagctacgcccacagccagagcttggaccggctgatgaatcctctgattgaccagtacctgtactacttgtctcggattcaaacaacaggaggcacggcaaatacgcagactctgggcttcagccaaggtgggcctaatacaatggccaatcaggcaaagaactggctgccaggaccctgttaccgccaacaacgcgtctcaacgacaaccgggcaaaacaacaatagcaactttgcctggactgctgggaccaaataccatctgaatggaagaaattcattggctaatcctggcatcgctatggcaacacacaaagacgacgaggagcgtttttttcccagtaacgggatcctgatttttggcaaacaaaatgctgccagagacaatgcggattacagcgatgtcatgcccaccagcgaggaagaaatcaaaaccactaaccctgtggccacagaggaatacggtatcgtggcagataacttgcagcagcaaaacacggctcctcaaattggaactgtcaacagccagggggccttacccggtatggtctggcagaaccgggacgtgtacctgcagggtcccatctgggccaagattcctcacacggacggcaacttccacccgtctccgctgatgggcggctttggcctgaaacatcctccgcctcagatcctgatcaagaacacgcctgtacctgcggatcctccgaccaccttcaaccagtcaaagctgaactctttcatcacgcaatacagcaccggacaggtcagcgtggaaattgaatgggagctgcagaaggaaaacagcaagcgctggaaccccgagatccagtacacctccaactactacaaatctacaagtgtggactttgctgttaatacagaaggcgtgtactctgaaccccgccccattggcacccgttacctcacccgtaatctgtaa

SEQ ID NO: 12544 - DNA, 2217 bp, Artificial Sequence
  source: /note="Description of Artificial Sequence: Synthetic polynucleotide"
atggctgccgatggttatcttccagattggctcgaggacaacctctctgagggcattcgcgagtggtgggcgctgaaacctggagccccgaagcccaaagccaaccagcaaaagcaggacgacggccggggtctggtgcttcctggctacaagtacctcggacccttcaacggactcgacaagggggagcccgtcaacgcggcggacgcggcggccctcgagcacgacaaggcctacgaccagcagctgcaggcgggtgacaatccgtacctgcggtataaccacgccgacgccgagtttcaggagcgtctgcaagaagatacgtcttttgggggcaacctcgggcgagcagtcttccaggccaagaagcgggttctcgaacctctcggtctggttgaggaaggcgctaagacggctcctggaaagaagagaccggtagagccatcaccccagcgttctccagactcctctacgggcatcggcaagaagggccaacagcccgccagaaaaagactcaattttggtcagactggcgactcagagtcagttccagaccctcaacctctcggagaacctccagcagcgccctctggtgtgggacctaatacaatggctgcaggcggtggcgcaccaatggcagacaataacgaaggcgccgacggagtgggtagttcctcgggaaattggcattgcgattccacatggctgggcgacagagtcatcaccaccagcacccgaacctgggccctgcccacctacaacaaccacctctacaagcaaatctccaacgggacatcgggaggagccaccaacgacaacacctacttcggctacagcaccccctgggggtattttgactttaacagattccactgccacttttcaccacgtgactggcagcgactcatcaacaacaactggggattccggcccaagagactcagcttcaagctcttcaacatccaggtcaaggaggtcacgcagaatgaaggcaccaagaccatcgccaataacctcaccagcaccatccaggtgtttacggactcggagtaccagctgccgtacgttctcggctctgcccaccagggctgcctgcctccgttcccggcggacgtgttcacgattccccagtacggctacctaacactcaacaacggtagtcaggccgtgggacgctcctccttctactgcctggaatactttccttcgcagatgctgagaaccggcaacaacttccagtttacttacaccttcgaggacgtgcctttccacagcagctacgcccacagccagagcttggaccggctgatgaatcctctgattgaccagtacctgtactacttgtctcggattcaaacaacaggaggcacggcaaatacgcagactctgggcttcagccaaggtgggcctaatacaatggccaatcaggcaaagaactggctgccaggaccctgttaccgccaacaacgcgtctcaacgacaaccgggcaaaacaacaatagcaactttgcctggactgctgggaccaaataccatctgaatggaagaaattcattggctaatcctggcatcgctatggcaacacacaaagacgacgaggagcgtttttttcccagtaacgggatcctgatttttggcaaacaaaatgctgccagagacaatgcggattacagcgatgtcatgcccaccagcgaggaagaaatcaaaaccactaaccctgtggccacagaggaatacggtatcgtggcagataacttgcagcagcaaaacacggctcctcaaattggaactgtcaacagccagggggccttacccggtatggtctggcagaaccgggacgtgtacctgcagggtcccatctgggccaagattcctcacacggacggcaacttccacccgtctccgctgatgggcggctttggcctgaaacatcctccgcctcagatcctgatcaagaacacgcctgtacctgcggatcctccgaccaccttcaaccagtcaaagctgaactctttcatcacgcaatacagcaccggacaggtcagcgtggaaattgaatgggagctgcggaaggaaaacagcaagcgctggaaccccgagatccagtacacctccaactactacaaatctacaagtgtggactttgctgttaatacagaaggcgtgtactctgaaccccgccccattggcacccgttacctcacccgtaatctgtaa

SEQ ID NO: 12545 - DNA, 2217 bp, Artificial Sequence
  source: /note="Description of Artificial Sequence: Synthetic polynucleotide"
atggctgccgatggttatcttccagattggctcgaggacaacctctctgagggcattcgcgagtggtgggcgctgaaacctggagccccgaagcccaaagccaaccagcaaaagcaggacgacggccggggtctggtgcttcctggctacaagtacctcggacccttcaacggactcgacaagggggagcccgtcaacgcggcggacgcggcggccctcgagcacgacaaggcctacgaccagcagctgcaggcgggtgacaatccgtacctgcggtataaccacgccgacgccgagtttcaggagcgtctgcaagaagatacgtcttttgggggcaacctcgggcgagcagtcttccaggccaagaagcgggttctcgaacctctcggtctggttgaggaaggcgctaagacggctcctggaaagaagagaccggtagagccatcaccccagcgttctccagactcctctacgggcatcggcaagaagggccaacagcccgccagaaaaagactcaattttggtcagactggcgactcagagtcagttccagaccctcaacctctcggagaacctccagcagcgccctctggtgtgggacctaatacaatggctgcaggcggtggcgcaccaatggcagacaataacgaaggcgccgacggagtgggtagttcctcgggaaattggcattgcgattccacatggctgggcgacagagtcatcaccaccagcacccgaacctgggccctgcccacctacaacaaccacctctacaagcaaatctccaacgggacatcgggaggagccaccaacgacaacacctacttcggctacagcaccccctgggggtattttgactttaacagattccactgccacttttcaccacgtgactggcagcgactcatcaacaacaactggggattccggcccaagagactcagcttcaagctcttcaacatccaggtcaaggaggtcacgcagaatgaaggcaccaagaccatcgccaataacctcaccagcaccatccaggtgtttacggactcggagtaccagctgccgtacgttctcggctctgcccaccagggctgcctgcctccgttcccggcggacgtgttcacgattccccagtacggctacctaacactcaacaacggtagtcaggccgtgggacgctcctccttctactgcctggaatactttccttcgcagatgctgagaaccggcaacaacttccagtttacttacaccttcgaggacgcgcctttccacagcagctacgcccacagccagagcttggaccggctgatgaatcctctgattgaccagtacctgtactacttgtctcggattcaaacaacaggaggcacggcaaatacgcagactctgggcttcagccaaggtgggcctaatacaatggccaatcaggcaaagaactggctgccaggaccctgttaccgccaacaacgcgtctcaacgacaaccgggcaaaacaacaatagcaactttgcctggactgctgggaccaaataccatctgaatggaagaaattcattggctaatcctggcatcgctatggcaacacacaaagacgacgaggagcgtttttttcccagtaacgggatcctgatttttggcaaacaaaatgctgccagagacaatgcggattacagcgatgtcatgcccaccagcgaggaagaaatcaaaaccactaaccctgtggccacagaggaatacggtatcgtggcagataacttgcagcagcaaaacacggctcctcaaattggaactgtcaacagccagggggccttacccggtatggtctggcagaaccgggacgtgtacctgcagggtcccatctgggccaagattcctcacacggacggcaacttccacccgtctccgctgatgggcggctttggcctgaaacatcctccgcctcagatcctgatcaagaacacgcctgtacctgcggatcctccgaccaccttcaaccagtcaaagctgaactctttcatcacgcaatacagcaccggacaggtcagcgtggaaattgaatgggagctgcagaaggaaaacagcaagcgctggaaccccgagatccagtacacctccaactactacaaatctacaagtgtggactttgctgttaatacagaaggcgtgtactctgaaccccgccccattggcacccgttacctcacccgtaatctgtaa

SEQ ID NO: 12546 - DNA, 2217 bp, Artificial Sequence
  source: /note="Description of Artificial Sequence: Synthetic polynucleotide"
atggctgccgatggttatcttccagattggctcgaggacaacctctctgagggcattcgcgagtggtgggcgctgaaacctggagccccgaagcccaaagccaaccagcaaaagcaggacgacggccggggtctggtgcttcctggctacaagtacctcggacccttcaacggactcgacaagggggagcccgtcaacgcggcggacgcggcggccctcgagcacgacaaggcctacgaccagcagctgcaggcgggtgacaatccgtacctgcggtataaccacgccgacgccgagtttcaggagcgtctgcaagaagatacgtcttttgggggcaacctcgggcgagcagtcttccaggccaagaagcgggttctcgaacctctcggtctggttgaggaaggcgctaagacggctcctggaaagaagagaccggtagagccatcaccccagcgttctccagactcctctacgggcatcggcaagaagggccaacagcccgccagaaaaagactcaattttggtcagactggcgactcagagtcagttccagaccctcaacctctcggagaacctccagcagcgccctctggtgtgggacctaatacaatggctgcaggcggtggcgcaccaatggcagacaataacgaaggcgccgacggagtgggtagttcctcgggaaattggcattgcgattccacatggctgggcgacagagtcatcaccgccagcacccgaacctgggccctgcccacctacaacaaccacctctacaagcaaatctccaacgggacatcgggaggagccaccaacgacaacacctacttcggctacagcaccccctgggggtattttgactttaacagattccactgccacttttcaccacgtgactggcagcgactcatcaacaacaactggggattccggcccaagagactcagcttcaagctcttcaacatccaggtcaaggaggtcacgcagaatgaaggcaccaagaccatcgccaataacctcaccagcaccatccaggtgtttacggactcggagtaccagctgccgtacgttctcggctctgcccaccagggctgcctgcctccgttcccggcggacgtgttcacgattccccagtacggctacctaacactcaacaacggtagtcaggccgtgggacgctcctccttctactgcctggaatactttccttcgcagatgctgagaaccggcaacaacttccagtttacttacaccttcgaggacgtgcctttccacagcagctacgcccacagccagagcttggaccggctgatgaatcctctgattgaccagtacctgtactacttgtctcggattcaaacaacaggaggcacggcaaatacgcagactctgggcttcagccaaggtgggcctaatacaatggccaatcaggcaaagaactggctgccaggaccctgttaccgccaacaacgcgtctcaacgacaaccgggcaaaacaacaatagcaactttgcctggactgctgggaccaaataccatctgaatggaagaaattcattggctaatcctggcatcgctatggcaacacacaaagacgacgaggagcgtttttttcccagtaacgggatcctgatttttggcaaacaaaatgctgccagagacaatgcggattacagcgatgtcatgcccaccagcgaggaagaaatcaaaaccactaaccctgtggccacagaggaatacggtatcgtggcagataacttgcagcagcaaaacacggctcctcaaattggaactgtcaacagccagggggccttacccggtatggtctggcagaaccgggacgtgtacctgcagggtcccatctgggccaagattcctcacacggacggcaacttccacccgtctccgctgatgggcggctttggcctgaaacatcctccgcctcagatcctgatcaagaacacgcctgtacctgcggatcctccgaccaccttcaaccagtcaaagctgaactctttcatcacgcaatacagcaccggacaggtcagcgtggaaattgaatgggagctgcagaaggaaaacagcaagcgctggaaccccgagatccagtacacctccaactactacaaatctacaagtgtggactttgctgttaatacagaaggcgtgtactctgaaccccgccccattggcacccgttacctcacccgtaatctgtaa

SEQ ID NO: 12547 - DNA, 2217 bp, Artificial Sequence
  source: /note="Description of Artificial Sequence: Synthetic polynucleotide"
atggctgccgatggttatcttccagattggctcgaggacaacctctctgagggcattcgcgagtggtgggcgctgaaacctggagccccgaagcccaaagccaaccagcaaaagcaggacgacggccggggtctggtgcttcctggctacaagtacctcggacccttcaacggactcgacaagggggagcccgtcaacgcggcggacgcggcggccctcgagcacgacaaggcctacgaccagcagctgcaggcgggtgacaatccgtacctgcggtataaccacgccgacgccgagtttcaggagcgtctgcaagaagatacgtcttttgggggcaacctcgggcgagcagtcttccaggccaagaagcgggttctcgaacctctcggtctggttgaggaaggcgctaagacggctcctggaaagaagagaccggtagagccatcaccccagcgttctccagactcctctacgggcatcggcaagaagggccaacagcccgccagaaaaagactcaattttggtcagactggcgactcagagtcagttccagaccctcaacctctcggagaacctccagcagcgccctctggtgtgggacctaatacaatggctgcaggcggtggcgcaccaatggcagacaataacgaaggcgccgacggagtgggtagttcctcgggaaattggcattgcgattccacatggctgggcgacagagtcatcaccaccagcacccgaacctgggccctgcccacctacaacaaccacctctacaagcaaatctccaacgggacatcgggaggagccaccaacgacaacacctacttcggctacagcaccccctgggggtattttgactttaacagattccactgccacttttcaccacgtgactggcagcgactcatcaacaacaactggggattccggcccaagagactcagcttcaagctcttcaacatccaggtcaaggaggtcacgcagaatgaaggcaccaagaccatcgccaataacctcaccagcaccatccaggtgtttacggactcggagtaccagctgccgtacgttctcggctctgcccaccagggctgcctgcctccgttcccggcggacgtgttcacgattccccagtacggctacctaacactcaacaacggtagtcaggccgtgggacgctcctccttctactgcctggaatactttccttcgcagatgctgagaaccggcaacaacttccagtttacttacaccttcgaggacgtgcctttccacagcagctacgcccacagccagagcttggaccggctgatgaatcctctgattgaccagtacctgtactacttgtctcggattcaaacaacaggaggcacggcaaatacgcagactctgggcttcagccaaggtgggcctaatacaatggccaatcaggcaaagaactggctgccaggaccctgttaccgccaacaacgcgtctcaacgacaaccgggcaaaacaacaatagcaactttgcctggactgctgggaccaaataccatctgaatggaagaaattcattggctaatcctggcatcgctatggcaacacacaaagacgacgaggagcgtttttttcccagtaacgggatcctgatttttggcaaacaaaatgctgccagagacaatgcggattacagcgatgtcatgcccaccagcgaggaagaaatcaaaaccactaaccctgtggccacagaggaatacggtatcgtggcagataacttgcagcagcaaaacacggctcctcaaattggaactgtcaacagccagggggccttacccggtatggtctggcagaaccgggacgtgtacctgcagggtcccatctgggccaagattcctcacacggacggcaacttccacccgtctccgctgatgggcggctttggcctgaaacatcctccgcctcagatcctgatcaagaacacgcctgtacctgcggatcctccgaccaccttcaaccagtcaaagctgaactctttcatcacgcaatacagcaccggacaggtcagcgtggaaattgaatgggagctgcagaaggaaaacagcaagcgccggaaccccgagatccagtacacctccaactactacaaatctacaagtgtggactttgctgttaatacagaaggcgtgtactctgaaccccgccccattggcacccgttacctcacccgtaatctgtaa

SEQ ID NO: 12548 - DNA, 2217 bp, Artificial Sequence
  source: /note="Description of Artificial Sequence: Synthetic polynucleotide"
atggctgccgatggttatcttccagattggctcgaggacaacctctctgagggcattcgcgagtggtgggcgctgaaacctggagccccgaagcccaaagccaaccagcaaaagcaggacgacggccggggtctggtgcttcctggctacaagtacctcggacccttcaacggactcgacaagggggagcccgtcaacgcggcggacgcggcggccctcgagcacgacaaggcctacgaccagcagctgcaggcgggtgacaatccgtacctgcggtataaccacgccgacgccgagtttcaggagcgtctgcaagaagatacgtcttttgggggcaacctcgggcgagcagtcttccaggccaagaagcgggttctcgaacctctcggtctggttgaggaaggcgctaagacggctcctggaaagaagagaccggtagagccatcaccccagcgttctccagactcctctacgggcatcggcaagaagggccaacagcccgccagaaaaagactcaattttggtcagactggcgactcagagccagttccagaccctcaacctctcggagaacctccagcagcgccctctggtgtgggacctaatacaatggctgcaggcggtggcgcaccaatggcagacaataacgaaggcgccgacggagtgggtagttcctcgggaaattggcattgcgattccacatggctgggcgacagagtcatcaccaccagcacccgaacctgggccctgcccacctacaacaaccacctctacaagcaaatctccaacgggacatcgggaggagccaccaacgacaacacctacttcggctacagcaccccctgggggtattttgactttaacagattccactgccacttttcaccacgtgactggcagcgactcatcaacaacaactggggattccggcccaagagactcagcttcaagctcttcaacatccaggtcaaggaggtcacgcagaatgaaggcaccaagaccatcgccaataacctcaccagcaccatccaggtgtttacggactcggagtaccagctgccgtacgttctcggctctgcccaccagggctgcctgcctccgttcccggcggacgtgttcacgattccccagtacggctacctaacactcaacaacggtagtcaggccgtgggacgctcctccttctactgcctggaatactttccttcgcagatgctgagaaccggcaacaacttccagtttacttacaccttcgaggacgtgcctttccacagcagctacgcccacagccagagcttggaccggctgatgaatcctctgattgaccagtacctgtactacttgtctcggattcaaacaacaggaggcacggcaaatacgcagactctgggcttcagccaaggtgggcctaatacaatggccaatcaggcaaagaactggctgccaggaccctgttaccgccaacaacgcgtctcaacgacaaccgggcaaaacaacaatagcaactttgcctggactgctgggaccaaataccatctgaatggaagaaattcattggctaatcctggcatcgctatggcaacacacaaagacgacgaggagcgtttttttcccagtaacgggatcctgatttttggcaaacaaaatgctgccagagacaatgcggattacagcgatgtcatgcccaccagcgaggaagaaatcaaaaccactaaccctgtggccacagaggaatacggtatcgtggcagataacttgcagcagcaaaacacggctcctcaaattggaactgtcaacagccagggggccttacccggtatggtctggcagaaccgggacgtgtacctgcagggtcccatctgggccaagattcctcacacggacggcaacttccacccgtctccgctgatgggcggctttggcctgaaacatcctccgcctcagatcctgatcaagaacacgcctgtacctgcggatcctccgaccaccttcaaccagtcaaagctgaactctttcatcacgcaatacagcaccggacaggtcagcgtggaaattgaatgggagctgcagaaggaaaacagcaagcgctggaaccccgagatccagtacacctccaactactacaaatctacaagtgtggactttgctgttaatacagaaggcgtgtactctgaaccccgccccattggcacccgttacctcacccgtaatctgtaa

SEQ ID NO: 12549 - DNA, 2217 bp, Artificial Sequence
  source: /note="Description of Artificial Sequence: Synthetic polynucleotide"
atggctgccgatggttatcttccagattggctcgaggacaacctctctgagggcattcgcgagtggtgggcgctgaaacctggagccccgaagcccaaagccaaccagcaaaagcaggacgacggccggggtctggtgcttcctggctacaagtacctcggacccttcaacggactcgacaagggggagcccgtcaacgcggcggacgcggcggccctcgagcacgacaaggcctacgaccagcagctgcaggcgggtgacaatccgtacctgcggtataaccacgccgacgccgagtttcaggagcgtctgcaagaagatacgtcttttgggggcaacctcgggcgagcagtcttccaggccaagaagcgggttctcgaacctctcggtctggttgaggaaggcgctaagacggctcctggaaagaagagaccggtagagccatcaccccagcgttctccagactcctctacgggcatcggcaagaagggccaacagcccgccagaaaaagactcaattttggtcagactggcgactcagagtcagttccagaccctcaacctctcggagaacctccagcagcgccctctggtgtgggacctaatacaatggctgcaggcggtggcgcaccaatggcagacaataacgaaggcgccgacggagtgggtagttcctcgggaaattggcattgcgattccacatggctgggcgacagagtcatcaccaccagcacccgaacctgggccctgcccacctacaacaaccacctctacaagcaaatctccaacgggacatcgggaggagccaccaacgacaacacctacttcggctacagcaccccctgggggtattttgactttaacagattccactgccacttttcaccacgtgactggcagcgactcatcaacaacaactggggattccggcccaagagactcagcttcaagctcttcaacatccaggtcaaggaggtcacgcagaatgaaggcaccaagaccatcgccaataacctcaccagcaccatccaggtgtttacggactcggagtaccagctgccgtacgttctcggctctgcccaccagggctgcctgcctccgttcccggcggacgtgttcacgattccccagtacggctacctaacactcaacaacggtagtcaggccgtgggacgctcctccttctactgcctggaatactttccttcgcagatgctgagaaccggcaacaacttccagtttacttacaccttcgaggacgtgcctttccacagcagctacgcccacagccagagcttggaccggctgatgaatcctctgattgaccagtacctgtactacttgtctcggattcaaacaacaggaggcacggcaaatacgcagactctgggcttcagccaaggtgggcctaatacaatggccaatcaggcaaagaactggctgccaggaccctgttaccgccaacaacgcgtctcaacgacaaccgggcaaaacaacaatagcaactttgcctggactgctgggaccaaataccatctgaatggaagaaattcattggctaatcctggcatcgctatggcaacacacaaagacgacgaggagcgtttttttcccagtaacgggatcccgatttttggcaaacaaaatgctgccagagacaatgcggattacagcgatgtcatgcccaccagcgaggaagaaatcaaaaccactaaccctgtggccacagaggaatacggtatcgtggcagataacttgcagcagcaaaacacggctcctcaaattggaactgtcaacagccagggggccttacccggtatggtctggcagaaccgggacgtgtacctgcagggtcccatctgggccaagattcctcacacggacggcaacttccacccgtctccgctgatgggcggctttggcctgaaacatcctccgcctcagatcctgatcaagaacacgcctgtacctgcggatcctccgaccaccttcaaccagtcaaagctgaactctttcatcacgcaatacagcaccggacaggtcagcgtggaaattgaatgggagctgcagaaggaaaacagcaagcgctggaaccccgagatccagtacacctccaactactacaaatctacaagtgtggactttgctgttaatacagaaggcgtgtactctgaaccccgccccattggcacccgttacctcacccgtaatctgtaa

SEQ ID NO: 12550 - DNA, 2217 bp, Artificial Sequence
  source: /note="Description of Artificial Sequence: Synthetic polynucleotide"
atggctgccgatggttatcttccagattggctcgaggacaacctctctgagggcattcgcgagtggtgggcgctgaaacctggagccccgaagcccaaagccaaccagcaaaagcaggacgacggccggggtctggtgcttcctggctacaagtacctcggacccttcaacggactcgacaagggggagcccgtcaacgcggcggacgcggcggccctcgagcacgacaaggcctacgaccagcagctgcaggcgggtgacaatccgtacctgcggtataaccacgccgacgccgagtttcaggagcgtctgcaagaagatacgtcttttgggggcaacctcgggcgagcagtcttccaggccaagaagcgggttctcgaacctctcggtctggttgaggaaggcgctaagacggctcctggaaagaagagaccggtagagccatcaccccagcgttctccagactcctctacgggcatcggcaagaagggccaacagcccgccagaaaaagactcaattttggtcagactggcgactcagagtcagttccagaccctcaacctctcggagaacctccagcagcgccctctggtgtgggacctaatacaatggctgcaggcggtggcgcaccaatggcagacaataacgaaggcgccgacggagtgggtagttcctcgggaaattggcattgcgattccacatggctgggcgacagagtcatcaccaccagcacccgaacctgggccctgcccacctacaacaaccacctctacaagcaaatctccaacgggacatcgggaggagccaccaacgacaacacctacttcggctacagcaccccctgggggtattttgactttaacagattccactgccacttttcaccacgtgactggcagcgactcatcaacaacaactggggattccggcccaagagactcagcttcaagctcttcaacatccaggtcaaggaggtcacgcagaatgaaggcaccaagaccatcgccaataacctcaccagcaccatccaggtgtttacggactcggagtaccagctgccgtacgttctcggctctgcccaccagggctgcctgcctccgttcccggcggacgtgttcacgattccccagtacggctacctaacactcaacaacggtagtcaggccgtgggacgctcctccttctactgcctggaatactttccttcgcagatgctgagaaccggcaacaacttccagtttacttacaccttcgaggacgtgcctttccacagcagctacgcccacagccagagcttggaccggctgatgaatcctctgattgaccagtacctgtactacttgtctcggattcaaacaacaggaggcacggcaaatacgcagactctgggcttcagccaaggtgggcctaatacaatggccaatcaggcaaagaactggctgccaggaccctgttaccgccaacaacgcgtctcaacgacaaccgggcaaaacaacaatagcaactttgcctggactgctgggaccaaataccatctgaatggaagaaattcattggctaatcctggcatcgctatggcaacacacaaagacgacgaggagcgtttttttcccagtaacgggatcctgatttttggcaaacaaaatgctgccagagacaatgcggattacagcgatgtcatgcccaccagcgaggaagaaatcaaaaccactaaccctgtggccacagaggaatacggtatcgtggcagataacttgcagcagcaaaacacggctcctcaaattggaactgtcaacagccagggggccttacccggtatggtctggcagaaccgggacgtgtacctgcagggtcccatctgggccaagattcctcacacggacggcaacttccacccgtctccgctgatgggcggctttggcctgaaacatcctccgcctcagatcctgatcaagaacacgcctgtacctgcggatcctccgaccaccttcaaccagtcaaagctgaactctttcatcacgcaatacagcaccggacaggtcagcgtggaaattgaatgggagctgcagaaggaaaacagcaagcgctggaaccccgagatccagcacacctccaactactacaaatctacaagtgtggactttgctgttaatacagaaggcgtgtactctgaaccccgccccattggcacccgttacctcacccgtaatctgtaa

SEQ ID NO: 12551 - DNA, 2217 bp, Artificial Sequence
  source: /note="Description of Artificial Sequence: Synthetic polynucleotide"
atggctgccgatggttatcttccagattggctcgaggacaacctctctgagggcattcgcgagtggtgggcgctgaaacctggagccccgaagcccaaagccaaccagcaaaagcaggacgacggccggggtctggtgcttcctggctacaagtacctcggacccttcaacggactcgacaagggggagcccgtcaacgcggcggacgcggcggccctcgagcacgacaaggcctacgaccagcagctgcaggcgggtgacaatccgtacctgcggtataaccacgccgacgccgagtttcaggagcgtctgcaagaagatacgtcttttgggggcaacctcgggcgagcagtcttccaggccaagaagcgggttctcgaacctctcggtctggttgaggaaggcgctaagacggctcctggaaagaagagaccggtagagccatcaccccagcgttctccagactcctctacgggcatcggcaagaagggccaacagcccgccagaaaaagactcaattttggtcagactggcgactcagagtcagttccagaccctcaacctctcggagaacctccagcagcgccctctggtgtgggacctaatacaatggctgcaggcggtggcgcaccaatggcagacaataacgaaggcgccgacggagtgggtagttcctcgggaaattggcattgcgattccacatggctgggcgacagagtcatcaccaccagcacccgaacctgggccctgcccacctacaacaaccacctctacaagcaaatctccaacgggacatcgggaggagccaccaacgacaacacctacttcggctacagcaccccctgggggtattttgactttaacagattccactgccacttttcaccacgtgactggcagcgactcatcaacaacaactggggattccggcccaagagactcagcttcaagctcttcaacatccaggtcaaggaggtcacgcagaatgaaggcaccaagaccatcgccaataacctcaccagcaccatccaggtgtttacggactcggagtaccagctgccgtacgttctcggctctgcccaccagggctgcctgcctccgttcccggcggacgtgttcacgattccccagtacggctacctaacactcaacaacggtagtcaggccgtgggacgctcctccttctactgcctggaatactttccttcgcagatgctgagaaccggcaacaacttccagtttacttacaccttcgaggacgtgcctttccacagcagctacgcccacagccagagcttggaccggctgatgaatcctctgattgaccagtacctgtactacttgtctcggattcaaacaacaggaggcacggcaaatacgcagactctgggcttcagccaaggtgggcctaatacaatggccaatcaggcaaagaactggctgccaggaccctgttaccgccaacaacgcgtctcaacgacaaccgggcaaaacaacaatagcaactttgcctggactgctgggaccaaataccatctgaatggaagaaattcattggctaatcctggcatcgctatggcaacacacaaagacgacgaggagcgtttttttcccagtaacgggatcctgatttttggcaaacaaaatgctgccagagacaatgcggattacagcgatgtcatgcccaccagcgaggaagaaatcaaaaccactaaccctgtggccacagaggaatacggtatcgtggcagataacttgcagcagcaaaacacggctcctcaaattggaactgtcaacagccagggggccttacccggtatggtctggcagaaccgggacgtgtacctgcagggtcccatctgggccaagattcctcacacggacggcaacttccacccgtctccgctgatgggcggctttggcctgaaacatcctccgcctcagatcctgatcaagaacacgcctgtacctgcggatcctccgaccaccttcaaccagtcaaagctgaaccctttcatcacgcaatacagcaccggacaggtcagcgtggaaattgaatgggagctgcagaaggaaaacagcaagcgctggaaccccgagatccagtacacctccaactactacaaatctacaagtgtggactttgctgttaatacagaaggcgtgtactctgaaccccgccccattggcacccgttacctcacccgtaatctgtaa

SEQ ID NO: 12552 - DNA, 2217 bp, Artificial Sequence
  source: /note="Description of Artificial Sequence: Synthetic polynucleotide"
atggctgccgatggttatcttccagattggctcgaggacaacctctctgagggcattcgcgagtggtgggcgctgaaacctggagccccgaagcccaaagccaaccagcaaaagcaggacgacggccggggtctggtgcttcctggctacaagtacctcggacccttcaacggactcgacaagggggagcccgtcaacgcggcggacgcggcggccctcgagcacgacaaggcctacgaccagcagctgcaggcgggtgacaatccgtacctgcggtataaccacgccgacgccgagtttcaggagcgtctgcaagaagatacgtcttttgggggcaacctcgggcgagcagtcttccaggccaagaagcgggttctcgaacctctcggtctggttgaggaaggcgctaagacggctcctggaaagaagagaccggtagagccatcaccccagcgttctccagactcctctacgggcatcggcaagaagggccaacagcccgccagaaaaagactcaattttggtcagactggcgactcagagtcagttccagaccctcaacctctcggagaacctccagcagcgccctctggtgtgggacctaatacaatggctgcaggcggtggcgcaccaatggcagacaataacgaaggcgccgacggagtgggtagttcctcgggaaattggcattgcgattccacatggctgggcgacagagtcatcaccaccagcacccgaacctgggccctgcccacctacaacaaccacctctacaagcaaatctccaacgggacatcgggaggagccaccaacgacaacacctacttcggctacagcaccccctgggggtattttgactttaacagattccactgccacttttcaccacgtgactggcagcgactcatcaacaacaactggggattccggcccaagagactcagcttcaagctcttcaacatccaggtcaaggaggtcacgcagaatgaaggcaccaagaccatcgccaataacctcaccagcaccatccaggtgtttacggactcggagtaccagctgccgtacgttctcggctctgcccaccagggctgcctgcctccgttcccggcggacgtgttcacgattccccagtacggctacctaacactcaacaacggtagtcaggccgtgggacgctcctccttctactgcctggaatactttccttcgcagatgctgagaaccggcaacaacttccagtttacttacaccttcgaggacgtgcctttccacagcagctacgcccacagccagagcttggaccggctgatgaatcctctgattgaccagtacctgtactacttgtctcggattcaaacaacaggaggcacggcaaatacgcagactctgggcttcagccaaggtgggcctaatacaatggccaatcaggcaaagaactggctgccaggaccctgttaccgccaacaacgcgtctcaacgacaaccgggcaaaacaacaatagcaactttgcctggactgctgggaccaaataccatctgaatggaagaaattcattggctaatcctggcatcgctatggcaacacacaaagacgacgaggagcgtttttttcccagtaacgggatcctgatttttggcaaacaaaatgctgccagagacaatgcggattacagcgatgtcatgcccaccagcgaggaagaaatcaaaaccactaaccctgtggccacagaggaatacggtatcgtggcagataacttgcagcagcaaaacacggctcctcaaattggaactgtcaacagccagggggccttacccggtatggtctggcagaaccgggacgtgtacctgcagggtcccatctgggccaagattcctcacacggacggcaacttccgcccgtctccgctgatgggcggctttggcctgaaacatcctccgcctcagatcctgatcaagaacacgcctgtacctgcggatcctccgaccaccttcaaccagtcaaagctgaactctttcatcacgcaatacagcaccggacaggtcagcgtggaaattgaatgggagctgcagaaggaaaacagcaagcgctggaaccccgagatccagtacacctccaactactacaaatctacaagtgtggactttgctgttaatacagaaggcgtgtactctgaaccccgccccattggcacccgttacctcacccgtaatctgtaa

SEQ ID NO: 12553 - DNA, 2217 bp, Artificial Sequence
  source: /note="Description of Artificial Sequence: Synthetic polynucleotide"
atggctgccgatggttatcttccagattggctcgaggacaacctctctgagggcattcgcgagtggtgggcgctgaaacctggagccccgaagcccaaagccaaccagcaaaagcaggacgacggccggggtctggtgcttcctggctacaagtacctcggacccttcaacggactcgacaagggggagcccgtcaacgcggcggacgcggcggccctcgagcacgacaaggcctacgaccagcagctgcaggcgggtgacaatccgtacctgcggtataaccacgccgacgccgagtttcaggagcgtctgcaagaagatacgtcttttgggggcaacctcgggcgagcagtcttccaggccaagaagcgggttctcgaacctctcggtctggttgaggaaggcgctaagacggctcctggaaagaagagaccggtagagccatcaccccagcgttctccagactcctctacgggcatcggcaagaagggccaacagcccgccagaaaaagactcaattttggtcagactggcgactcagagtcagttccagaccctcaacctctcggagaacctccagcagcgccctctggtgtgggacctaatacaatggctgcaggcggtggcgcaccaatggcagacaataacgaaggcgccgacggagtgggtagttcctcgggaaattggcattgcgattccacatggctgggcgacagagtcatcaccaccagcacccgaacctgggccctgcccacctacaacaaccacctctacaagcaaatctccaacgggacatcgggaggagccaccaacgacaacacctacttcggctacagcaccccctgggggtattttgactttaacagattccactgccacttttcaccacgtgactggcagcgactcatcaacaacaactggggattccggcccaagagactcagcttcaagctcttcaacatccaggtcaaggaggtcacgcagaatgaaggcaccaagaccatcgccaataacctcaccagcaccatccaggtgtttacggactcggagtaccagctgccgtacgttctcggctctgcccaccagggctgcctgcctccgttcccggcggacgtgttcacgattccccagtacggctacctaacactcaacaacggtagtcaggccgtgggacgctcctccttctactgcctggaatactttccttcgcagatgctgagaaccggcaacaacttccagtttacttacaccttcgaggacgtgcctttccacagcagctacgcccacagccagagcttggaccggctgatgaatcctctgattgaccagtacctgtactacttgtctcggattcaaacaacaggaggcacggcaaatacgcagactctgggcttcagccaaggtgggcctaatacaatggccaatcaggcaaagaactggctgccaggaccctgttaccgccaacaacgcgtctcaacgacaaccgggcaaaacaacaatagcaactttgcctggactgctgggaccaaataccatctgaatggaagaaattcattggctaatcctggcatcgctatggcaacacacaaagacgacgaggagcgtttttttcccagtaacgggatcctgatttttggcaaacaaaatgctgccagagacaatgcggattacagcgatgtcatgcccaccagcgaggaagaaatcaaaaccactaaccctgtggccacagaggaatacggtatcgtggcagataacttgcagcagcaaaacacggctcctcaaattggaactgtcaacagccagggggccttacccggtatggtctggcagaaccgggacgtgtacctgcagggtcccatctgggccaagattcctcacacggacggcaacttccacccgtctccgctgatgggcggctttggcctgaaacatcctccgcctcagatcctgatcaagaacacgcctgtacctgcggatcctccgaccaccttcaaccagtcaaagctgaactctttcatcacgcaatacagcaccggacaggtcagcgtggaaattgaatgggagctgcagaaggaaaacagcaagcgctggaaccccgagatccagtacacctccaactactacaaatctacaagtgtggactttgctgttaatacagaaggcgtgtactctgaaccccgccccattggcgcccgttacctcacccgtaatctgtaa

SEQ ID NO: 12554 - DNA, 2217 bp, Artificial Sequence
  source: /note="Description of Artificial Sequence: Synthetic polynucleotide"
atggctgccgatggttatcttccagattggctcgaggacaacctctctgagggcattcgcgagtggtgggcgctgaaacctggagccccgaagcccaaagccaaccagcaaaagcaggacgacggccggggtctggtgcttcctggctacaagtacctcggacccttcaacggactcgacaagggggagtccgtcaacgcggcggacgcggcggccctcgagcacgacaaggcctacgaccagcagctgcaggcgggtgacaatccgtacctgcggtataaccacgccgacgccgagtttcaggagcgtctgcaagaagatacgtcttttgggggcaacctcgggcgagcagtcttccaggccaagaagcgggttctcgaacctctcggtctggttgaggaaggcgctaagacggctcctggaaagaagagaccggtagagccatcaccccagcgttctccagactcctctacgggcatcggcaagaagggccaacagcccgccagaaaaagactcaattttggtcagactggcgactcagagtcagttccagaccctcaacctctcggagaacctccagcagcgccctctggtgtgggacctaatacaatggctgcaggcggtggcgcaccaatggcagacaataacgaaggcgccgacggagtgggtagttcctcgggaaattggcattgcgattccacatggctgggcgacagagtcatcaccaccagcacccgaacctgggccctgcccacctacaacaaccacctctacaagcaaatctccaacgggacatcgggaggagccaccaacgacaacacctacttcggctacagcaccccctgggggtattttgactttaacagattccactgccacttttcaccacgtgactggcagcgactcatcaacaacaactggggattccggcccaagagactcagcttcaagctcttcaacatccaggtcaaggaggtcacgcagaatgaaggcaccaagaccatcgccaataacctcaccagcaccatccaggtgtttacggactcggagtaccagctgccgtacgttctcggctctgcccaccagggctgcctgcctccgttcccggcggacgtgttcacgattccccagtacggctacctaacactcaacaacggtagtcaggccgtgggacgctcctccttctactgcctggaatactttccttcgcagatgctgagaaccggcaacaacttccagtttacttacaccttcgaggacgtgcctttccacagcagctacgcccacagccagagcttggaccggctgatgaatcctctgattgaccagtacctgtactacttgtctcggattcaaacaacaggaggcacggcaaatacgcagactctgggcttcagccaaggtgggcctaatacaatggccaatcaggcaaagaactggctgccaggaccctgttaccgccaacaacgcgtctcaacgacaaccgggcaaaacaacaatagcaactttgcctggactgctgggaccaaataccatctgaatggaagaaattcattggctaatcctggcatcgctatggcaacacacaaagacgacgaggagcgtttttttcccagtaacgggatcctgatttttggcaaacaaaatgctgccagagacaatgcggattacagcgatgtcatgcccaccagcgaggaagaaatcaaaaccactaaccctgtggccacagaggaatacggtatcgtggcagataacttgcagcagcaaaacacggctcctcaaattggaactgtcaacagccagggggccttacccggtatggtctggcagaaccgggacgtgtacctgcagggtcccatctgggccaagattcctcacacggacggcaacttccacccgtctccgctgatgggcggctttggcctgaaacatcctccgcctcagatcctgatcaagaacacgcctgtacctgcggatcctccgaccaccttcaaccagtcaaagctgaactctttcatcacgcaatacagcaccggacaggtcagcgtggaaattgaatgggagctgcagaaggaaaacagcaagcgctggaaccccgagatccagtacacctccaactactacaaatctacaagtgtggactttgctgttaatacagaaggcgtgtactctgaaccccgccccattggcacccgttacctcacccgtaatctgtaa

SEQ ID NO: 12555 - DNA, 2217 bp, Artificial Sequence
  source: /note="Description of Artificial Sequence: Synthetic polynucleotide"
atggctgccgatggttatcttccagattggctcgaggacaacctctctgagggcattcgcgagtggtgggcgctgaaacctggagccccgaagcccaaagccaaccagcaaaagcaggacgacggccggggtctggtgcttcctggctacaagtacctcggacccttcaacggactcgacaagggggagcccgtcaacgcggcggacgcggcggccctcgagcacgacaaggcctacgaccagcagctgcaggcgggtgacaatccgtacctgcggtataaccacgccgacgccgagtttcaggagcgtctgcaagaagatacgtcttttgggggcaacctcgggcgagcagtcttccaggccaagaagcgggttctcgaacctctcggtctggttgaggaaggcgctaagacggctcctggaaagaagagaccggtagagccatcaccccagcgttctccagactcctctacgggcatcggcaagaagggccaacagcccgccagaaaaagactcaattttggtcagactggcgactcagagtcagttccagaccctcaacctctcggagaacctccagcagcgccctctggtgtgggacctaatacaatggctgcaggcggtggcgcaccaatggcagacaatagcgaaggcgccgacggagtgggtagttcctcgggaaattggcattgcgattccacatggctgggcgacagagtcatcaccaccagcacccgaacctgggccctgcccacctacaacaaccacctctacaagcaaatctccaacgggacatcgggaggagccaccaacgacaacacctacttcggctacagcaccccctgggggtattttgactttaacagattccactgccacttttcaccacgtgactggcagcgactcatcaacaacaactggggattccggcccaagagactcagcttcaagctcttcaacatccaggtcaaggaggtcacgcagaatgaaggcaccaagaccatcgccaataacctcaccagcaccatccaggtgtttacggactcggagtaccagctgccgtacgttctcggctctgcccaccagggctgcctgcctccgttcccggcggacgtgttcacgattccccagtacggctacctaacactcaacaacggtagtcaggccgtgggacgctcctccttctactgcctggaatactttccttcgcagatgctgagaaccggcaacaacttccagtttacttacaccttcgaggacgtgcctttccacagcagctacgcccacagccagagcttggaccggctgatgaatcctctgattgaccagtacctgtactacttgtctcggattcaaacaacaggaggcacggcaaatacgcagactctgggcttcagccaaggtgggcctaatacaatggccaatcaggcaaagaactggctgccaggaccctgttaccgccaacaacgcgtctcaacgacaaccgggcaaaacaacaatagcaactttgcctggactgctgggaccaaataccatctgaatggaagaaattcattggctaatcctggcatcgctatggcaacacacaaagacgacgaggagcgtttttttcccagtaacgggatcctgatttttggcaaacaaaatgctgccagagacaatgcggattacagcgatgtcatgcccaccagcgaggaagaaatcaaaaccactaaccctgtggccacagaggaatacggtatcgtggcagataacttgcagcagcaaaacacggctcctcaaattggaactgtcaacagccagggggccttacccggtatggtctggcagaaccgggacgtgtacctgcagggtcccatctgggccaagattcctcacacggacggcaacttccacccgtctccgctgatgggcggctttggcctgaaacatcctccgcctcagatcctgatcaagaacacgcctgtacctgcggatcctccgaccaccttcaaccagtcaaagctgaactctttcatcacgcaatacagcaccggacaggtcagcgtggaaattgaatgggagctgcagaaggaaaacagcaagcgctggaaccccgagatccagtacacctccaactactacaaatctacaagtgtggactttgctgttaatacagaaggcgtgtactctgaaccccgccccattggcacccgttacctcacccgtaatctgtaa

SEQ ID NO: 12556 - DNA, 2217 bp, Artificial Sequence
  source: /note="Description of Artificial Sequence: Synthetic polynucleotide"
atggctgccgatggttatcttccagattggctcgaggacaacctctctgagggcattcgcgagtggtgggcgctgaaacctggagccccgaagcccaaagccaaccagcaaaagcaggacgacggccggggtctggtgcttcctggctacaagtacctcggacccttcaacggactcgacaagggggagcccgtcaacgcggcggacgcggcggccctcgagcacgacaaggcctacgaccagcagctgcaggcgggtgacaatccgtacctgcggtataaccacgccgacgccgagtttcaggagcgtctgcaagaagatacgtcttttgggggcaacctcgggcgagcagtcttccaggccaagaagcgggttctcgaacctctcggtctggttgaggaaggcgctaagacggctcctggaaagaagagaccggtagagccatcaccccagcgttctccagactcctctacgggcatcggcaagaagggccaacagcccgccagaaaaagactcaattttggtcagactggcgactcagagtcagttccagaccctcaacctctcggagaacctccagcagcgccctctggtgtgggacctaatacaatggctgcaggcggtggcgcaccaatggcagacaataacgaaggcgccgacggagtgggtagttcctcgggaaattggcattgcgattccacatggctgggcgacagagtcatcaccaccagcacccgaacctgggccctgcccacctacaacaaccacctctacaagcaaatctccaacgggacatcgggaggagccaccaacgacaacacctacttcggctacagcaccccctgggggtattttgactttaacagattccactgccacttttcaccacgtgactggcagcgactcatcaacaacaactggggattccggcccaagagactcagcttcaagctcttcaacatccaggtcaaggaggtcacgcagaatgaaggcaccaagaccatcgccaataacctcaccagcaccatccaggtgtttacggactcggagtaccagctgccgtacgttctcggctctgcccaccagggctgcctgcctccgttcccggcggacgtgttcacgattccccagtacggctacctaacactcaacaacggtagtcaggccgtgggacgctcctccttctactgcctggaatactttccttcgcagatgctgagaaccggcaacaacttccagtttacttacaccttcgaggacgtgcctttccacagcagctacgcccacagccagagcttggaccggctgatgaatcctctgattgaccagtacctgtactacttgtctcggattcaaacaacaggaggcacggcaaatacgcagactctgggcttcagccaaggtgggcctaatacaatggccaatcaggcaaagaactggctgccaggaccctgttaccgccaacaacgcgtctcaacgacaaccgggcaaaacaacaatagcaactttgcctggactgctgggaccaaataccatctgaatggaagaaattcattggctaatcctggcatcgctatggcaacacacaaagacgacgaggagcgtttttttcccagtaacgggatcctgatttttggcaaacaaaatgctgccagagacaatgcggattacggcgatgtcatgcccaccagcgaggaagaaatcaaaaccactaaccctgtggccacagaggaatacggtatcgtggcagataacttgcagcagcaaaacacggctcctcaaattggaactgtcaacagccagggggccttacccggtatggtctggcagaaccgggacgtgtacctgcagggtcccatctgggccaagattcctcacacggacggcaacttccacccgtctccgctgatgggcggctttggcctgaaacatcctccgcctcagatcctgatcaagaacacgcctgtacctgcggatcctccgaccaccttcaaccagtcaaagctgaactctttcatcacgcaatacagcaccggacaggtcagcgtggaaattgaatgggagctgcagaaggaaaacagcaagcgctggaaccccgagatccagtacacctccaactactacaaatctacaagtgtggactttgctgttaatacagaaggcgtgtactctgaaccccgccccattggcacccgttacctcacccgtaatctgtaa

SEQ ID NO: 12557 - DNA, 2217 bp, Artificial Sequence
  source: /note="Description of Artificial Sequence: Synthetic polynucleotide"
atggctgccgatggttatcttccagattggctcgaggacaacctctctgagggcattcgcgagtggtgggcgctgaaacctggagccccgaagcccaaagccaaccagcaaaagcaggacgacggccggggtctggtgcttcctggctacaagtacctcggacccttcaacggactcgacaagggggagcccgtcaacgcggcggacgcggcggccctcgagcacgacaaggcctacgaccagcagctgcaggcgggtgacaatccgtacctgcggtataaccacgccgacgccgagtttcaggagcgtctgcaagaagatacgtcttttgggggcaacctcgggcgagcagtcttccaggccaagaagcgggttctcgaacctctcggtctggttgaggaaggcgctaagacggctcctggaaagaggagaccggtagagccatcaccccagcgttctccagactcctctacgggcatcggcaagaagggccaacagcccgccagaaaaagactcaattttggtcagactggcgactcagagtcagttccagaccctcaacctctcggagaacctccagcagcgccctctggtgtgggacctaatacaatggctgcaggcggtggcgcaccaatggcagacaataacgaaggcgccgacggagtgggtagttcctcgggaaattggcattgcgattccacatggctgggcgacagagtcatcaccaccagcacccgaacctgggccctgcccacctacaacaaccacctctacaagcaaatctccaacgggacatcgggaggagccaccaacgacaacacctacttcggctacagcaccccctgggggtattttgactttaacagattccactgccacttttcaccacgtgactggcagcgactcatcaacaacaactggggattccggcccaagagactcagcttcaagctcttcaacatccaggtcaaggaggtcacgcagaatgaaggcaccaagaccatcgccaataacctcaccagcaccatccaggtgtttacggactcggagtaccagctgccgtacgttctcggctctgcccaccagggctgcctgcctccgttcccggcggacgtgttcacgattccccagtacggctacctaacactcaacaacggtagtcaggccgtgggacgctcctccttctactgcctggaatactttccttcgcagatgctgagaaccggcaacaacttccagtttacttacaccttcgaggacgtgcctttccacagcagctacgcccacagccagagcttggaccggctgatgaatcctctgattgaccagtacctgtactacttgtctcggattcaaacaacaggaggcacggcaaatacgcagactctgggcttcagccaaggtgggcctaatacaatggccaatcaggcaaagaactggctgccaggaccctgttaccgccaacaacgcgtctcaacgacaaccgggcaaaacaacaatagcaactttgcctggactgctgggaccaaataccatctgaatggaagaaattcattggctaatcctggcatcgctatggcaacacacaaagacgacgaggagcgtttttttcccagtaacgggatcctgatttttggcaaacaaaatgctgccagagacaatgcggattacagcgatgtcatgcccaccagcgaggaagaaatcaaaaccactaaccctgtggccacagaggaatacggtatcgtggcagataacttgcagcagcaaaacacggctcctcaaattggaactgtcaacagccagggggccttacccggtatggtctggcagaaccgggacgtgtacctgcagggtcccatctgggccaagattcctcacacggacggcaacttccacccgtctccgctgatgggcggctttggcctgaaacatcctccgcctcagatcctgatcaagaacacgcctgtacctgcggatcctccgaccaccttcaaccagtcaaagctgaactctttcatcacgcaatacagcaccggacaggtcagcgtggaaattgaatgggagctgcagaaggaaaacagcaagcgctggaaccccgagatccagtacacctccaactactacaaatctacaagtgtggactttgctgttaatacagaaggcgtgtactctgaaccccgccccattggcacccgttacctcacccgtaatctgtaa

SEQ ID NO: 12558 - DNA, 2217 bp, Artificial Sequence
  source: /note="Description of Artificial Sequence: Synthetic polynucleotide"
atggctgccgatggttatcttccagattggctcgaggacaacctctctgagggcattcgcgagtggtgggcgctgaaacctggagccccgaagcccaaagccaaccagcaaaagcaggacgacggccggggtctggtgcttcctggctacaagtacctcggacccttcaacggactcgacaagggggagcccgtcaacgcggcggacgcggcggccctcgagcacgacaaggcctacgaccagcagctgcaggcgggtgacaatccgtacctgcggtataaccacgccgacgccgagtttcaggagcgtctgcaagaagatacgtcttttgggggcaacctcgggcgagcagtcttccaggccaagaagcgggttctcgaacctctcggtctggttgaggaaggcgctaagacggctcctggaaagaagagaccggtagagccatcaccccagcgttctccagactcctctacgggcatcggcaagaagggccaacagcccgccagaaaaagactcaattttggtcagactggcgactcagagtcagttccagaccctcaacctctcggagaacctccagcagcgccctctggtgtgggacctaatacaatggctgcaggcggtggcgcaccaatggcagacaataacgaaggcgccgacggagtgggtagttcctcgggaaattggcattgcgattccacatggctgggcgacagagtcatcaccaccagcacccgaacctgggccctgcccacctacaacaaccacctctacaagcaaatctccaacgggacatcgggaggagccaccaacgacaacacctacttcggctacagcaccccctgggggtattttgactttaacagattccactgccacttttcaccacgtgactggcagcgactcatcaacaacaactggggattccggcccaagagactcagcttcaagctcttcaacatccaggtcaaggaggtcacgcagaatgaaggcaccaagaccatcgccaataacctcaccagcaccatccaggtgtttacggactcggagtaccagctgccgtacgttctcggctctgcccaccagggctgcctgcctccgttcccggcggacgtgttcacgattccccagtacggctacctaacactcaacaacggtagtcaggccgtgggacgctcctccttctactgcctggaatactttccttcgcagatgctgagaaccggcaacaacttccagtttacttacaccttcgaggacgtgcctttccacagcagctacgcccacagccagagcttggaccggctgatgaatcctctgattgaccagtacctgtactacttgtctcggattcaaacaacaggaggcacggcaaatacgcagactctgggcttcagccaaggtgggcctaatacaatggccaatcaggcaaagaactggctgccaggaccctgttaccgccaacaacgcgtcccaacgacaaccgggcaaaacaacaatagcaactttgcctggactgctgggaccaaataccatctgaatggaagaaattcattggctaatcctggcatcgctatggcaacacacaaagacgacgaggagcgtttttttcccagtaacgggatcctgatttttggcaaacaaaatgctgccagagacaatgcggattacagcgatgtcatgcccaccagcgaggaagaaatcaaaaccactaaccctgtggccacagaggaatacggtatcgtggcagataacttgcagcagcaaaacacggctcctcaaattggaactgtcaacagccagggggccttacccggtatggtctggcagaaccgggacgtgtacctgcagggtcccatctgggccaagattcctcacacggacggcaacttccacccgtctccgctgatgggcggctttggcctgaaacatcctccgcctcagatcctgatcaagaacacgcctgtacctgcggatcctccgaccaccttcaaccagtcaaagctgaactctttcatcacgcaatacagcaccggacaggtcagcgtggaaattgaatgggagctgcagaaggaaaacagcaagcgctggaaccccgagatccagtacacctccaactactacaaatctacaagtgtggactttgctgttaatacagaaggcgtgtactctgaaccccgccccattggcacccgttacctcacccgtaatctgtaa

SEQ ID NO: 12559 - DNA, 2217 bp, Artificial Sequence
  source: /note="Description of Artificial Sequence: Synthetic polynucleotide"
atggctgccgatggttatcttccagattggctcgaggacaacctctctgagggcattcgcgagtggtgggcgctgaaacctggagccccgaagcccaaagccaaccagcaaaagcaggacgacggccggggtctggtgcttcctggctacaagtacctcggacccttcaacggactcgacaagggggagcccgtcaacgcggcggacgcggcggccctcgagcacgacaaggcctacgaccagcagctgcaggcgggtgacaatccgtacctgcggtataaccacgccgacgccgagtttcaggagcgtctgcaagaagatacgtcttttgggggcaacctcgggcgagcagtcttccaggccaagaagcgggttctcgaacctctcggtctggttgaggaaggcgctaagacggctcctggaaagaagagaccggtagagccatcaccccagcgttctccagactcctctacgggcatcggcaagaagggccaacagcccgccagaaaaagactcaattttggtcagactggcgactcagagtcagttccagaccctcaacctctcggagaacctccagcagcgccctctggtgtgggacctaatacaatggctgcaggcggtggcgcaccaatggcagacaataacgaaggcgccgacggagtgggtagttcctcgggaaattggcattgcgattccacatggctgggcgacagagtcatcaccaccagcacccgaacctgggccctgcccacctacaacaaccacctctacaagcaaatctccaacgggacatcgggaggagccaccaacgacaacacctacttcggctacagcaccccctgggggtattttgactttaacagattccactgccacttttcaccacgtgactggcagcgactcatcaacaacaactggggattccggcccaagagactcagcttcaagctcttcaacatccaggtcaaggaggtcacgcagaatgaaggcaccaagaccatcgccaataacctcaccagcaccatccaggtgtttacggactcggagtaccagctgccgtacgttctcggctctgcccaccagggctgcctgcctccgttcccggcggacgtgttcacgattccccagtacggctacctaacactcaacaacggtagtcaggccgtgggacgctcctccttctactgcctggaatactttccttcgcagatgctgagaaccggcaacaacttccagtttacttacaccttcgaggacgtgcctttccacagcagctacgcccacagccagagcttggaccggctgatgaatcctctgattgaccagtacctgtactacttgtctcggattcaaacaacaggaggcacggcaaatacgcagactctgggcttcagccaaggtgggcctaatacaatggccaatcaggcaaagaactggctgccaggaccctgttaccgccaacaacgcgtctcaacgacaaccgggcaaaacaacaatagcaactttgcctggactgctgggaccaaataccatctgaatggaagaaattcattggctaatcctggcatcgctatggcaacacacaaagacgacgaggagcgtttttttcccagtaacgggatcctgatttttggcaaacaaaatgctgccagagacaatgcggattacagcgatgtcatgcccaccagcgaggaagaaatcaaaaccactaaccctgtggccacagaggaatacggtatcgtggcagataacttgcagcagcaaaacacggctcctcaaattggaactgtcaacagccagggggccttacccggtatggtctggcagaaccgggacgtgtacctgcagggtcccatctgggccaagattcctcacacggacggcaacttccacccgtctccgctgatgggcggctttggcctgaaacatcctccgcctcagatcctgatcaagaacacgcctgtacctgcggatcctccgaccaccttcaaccagtcaaagctgaactctttcatcacgcaatacagcaccggacaggtcagcgtggaaattgaatgggagctgcagaaggaaaacagcaagcgctggaaccccgagatccagtacacctccaactactacaaatctacaagtgtggactttgctgttaatacagaaggcgtgtactctgaaccccgccccattggcacccgttacctcacccgtaatctgtaa

SEQ ID NO: 12560 - DNA, 2217 bp, Artificial Sequence
  source: /note="Description of Artificial Sequence: Synthetic polynucleotide"
atggctgccgatggttatcttccagattggctcgaggacaacctctctgagggcattcgcgagtggtgggcgctgaaacctggagccccgaagcccaaagccaaccagcaaaagcaggacgacggccggggtctggtgcttcctggctacaagtacctcggacccttcaacggactcgacaagggggagcccgtcaacgcggcggacgcggcggccctcgagcacgacaaggcctacgaccagcagctgcaggcgggtgacaatccgtacctgcggtataaccacgccgacgccgagtttcaggagcgtctgcaagaagatacgtcttttgggggcaacctcgggcgagcagtcttccaggccaagaagcgggttctcgaacctctcggtctggttgaggaaggcgctaagacggctcctggaaagaagagaccggtagagccatcaccccagcgttctccagactcctctacgggcatcggcaagaagggccaacagcccgccagaaaaagactcaattttggtcagactggcgactcagagtcagttccagaccctcaacctctcggagaacctccagcagcgccctctggtgtgggacctaatacaatggctgcaggcggtggcgcaccaatggcagacaataacgaaggcgccgacggagtgggtagttcctcgggaaattggcattgcgattccacatggctgggcgacagagtcatcaccaccagcacccgaacctgggccctgcccacctacaacaaccacctctacaagcaaatctccaacgggacatcgggaggagccaccaacgacaacacctacttcggctacagcaccccctgggggtattttgactttaacagattccaccgccacttttcaccacgtgactggcagcgactcatcaacaacaactggggattccggcccaagagactcagcttcaagctcttcaacatccaggtcaaggaggtcacgcagaatgaaggcaccaagaccatcgccaataacctcaccagcaccatccaggtgtttacggactcggagtaccagctgccgtacgttctcggctctgcccaccagggctgcctgcctccgttcccggcggacgtgttcacgattccccagtacggctacctaacactcaacaacggtagtcaggccgtgggacgctcctccttctactgcctggaatactttccttcgcagatgctgagaaccggcaacaacttccagtttacttacaccttcgaggacgtgcctttccacagcagctacgcccacagccagagcttggaccggctgatgaatcctctgattgaccagtacctgtactacttgtctcggattcaaacaacaggaggcacggcaaatacgcagactctgggcttcagccaaggtgggcctaatacaatggccaatcaggcaaagaactggctgccaggaccctgttaccgccaacaacgcgtctcaacgacaaccgggcaaaacaacaatagcaactttgcctggactgctgggaccaaataccatctgaatggaagaaattcattggctaatcctggcatcgctatggcaacacacaaagacgacgaggagcgtttttttcccagtaacgggatcctgatttttggcaaacaaaatgctgccagagacaatgcggattacagcgatgtcatgcccaccagcgaggaagaaatcaaaaccactaaccctgtggccacagaggaatacggtatcgtggcagataacttgcagcagcaaaacacggctcctcaaattggaactgtcaacagccagggggccttacccggtatggtctggcagaaccgggacgtgtacctgcagggtcccatctgggccaagattcctcacacggacggcaacttccacccgtctccgctgatgggcggctttggcctgaaacatcctccgcctcagatcctgatcaagaacacgcctgtacctgcggatcctccgaccaccttcaaccagtcaaagctgaactctttcatcacgcaatacagcaccggacaggtcagcgtggaaattgaatgggagctgcagaaggaaaacagcaagcgctggaaccccgagatccagtacacctccaactactacaaatctacaagtgtggactttgctgttaatacagaaggcgtgtactctgaaccccgccccattggcacccgttacctcacccgtaatctgtaa

SEQ ID NO: 12561 - DNA, 2217 bp, Artificial Sequence
  source: /note="Description of Artificial Sequence: Synthetic polynucleotide"
atggctgccgatggttatcttccagattggctcgaggacaacctctctgagggcattcgcgagtggtgggcgctgaaacctggagccccgaagcccaaagccaaccagcaaaagcaggacgacggccggggtctggtgcttcctggctacaagtacctcggacccttcaacggactcgacaagggggagcccgtcaacgcggcggacgcggcggccctcgagcacgacaaggcctacgaccagcagctgcaggcgggtgacaatccgtacctgcggtataaccacgccgacgccgagtttcaggagcgtctgcaagaagatacgtcttttgggggcaacctcgggcgagcagtcttccaggccaagaagcgggttctcgaacctctcggtctggttgaggaaggcgctaagacggctcctggaaagaagagaccggtagagccatcaccccagcgttctccagactcctctacgggcatcggcaagaagggccaacagcccgccagaaaaagactcaattttggtcagactggcgactcagagtcagttccagaccctcaacctctcggagaacctccagcagcgccctctggtgtgggacctaatacaatggctgcaggcggtggcgcaccaatggcagacaataacgaaggcgccgacggagtgggtagttcctcgggaaattggcattgcgattccacatggctgggcgacagagtcatcaccaccagcacccgaacctgggccctgcccacctacaacaaccacctctacaagcaaatctccaacgggacatcgggaggagccaccaacgacaacacctacttcggctacagcaccccctgggggtattttgactttaacagattccactgccacttttcaccacgtgactggcagcgactcatcaacaacaactggggattccggcccaagagactcagcttcaagctcttcaacatccaggtcaaggaggtcacgcagaatgaaggcaccaagaccatcgccaataacctcaccagcaccatccaggtgtttacggactcggagtgccagctgccgtacgttctcggctctgcccaccagggctgcctgcctccgttcccggcggacgtgttcacgattccccagtacggctacctaacactcaacaacggtagtcaggccgtgggacgctcctccttctactgcctggaatactttccttcgcagatgctgagaaccggcaacaacttccagtttacttacaccttcgaggacgtgcctttccacagcagctacgcccacagccagagcttggaccggctgatgaatcctctgattgaccagtacctgtactacttgtctcggattcaaacaacaggaggcacggcaaatacgcagactctgggcttcagccaaggtgggcctaatacaatggccaatcaggcaaagaactggctgccaggaccctgttaccgccaacaacgcgtctcaacgacaaccgggcaaaacaacaatagcaactttgcctggactgctgggaccaaataccatctgaatggaagaaattcattggctaatcctggcatcgctatggcaacacacaaagacgacgaggagcgtttttttcccagtaacgggatcctgatttttggcaaacaaaatgctgccagagacaatgcggattacagcgatgtcatgcccaccagcgaggaagaaatcaaaaccactaaccctgtggccacagaggaatacggtatcgtggcagataacttgcagcagcaaaacacggctcctcaaattggaactgtcaacagccagggggccttacccggtatggtctggcagaaccgggacgtgtacctgcagggtcccatctgggccaagattcctcacacggacggcaacttccacccgtctccgctgatgggcggctttggcctgaaacatcctccgcctcagatcctgatcaagaacacgcctgtacctgcggatcctccgaccaccttcaaccagtcaaagctgaactctttcatcacgcaatacagcaccggacaggtcagcgtggaaattgaatgggagctgcagaaggaaaacagcaagcgctggaaccccgagatccagtacacctccaactactacaaatctacaagtgtggactttgctgttaatacagaaggcgtgtactctgaaccccgccccattggcacccgttacctcacccgtaatctgtaa

SEQ ID NO: 12562 - DNA, 2217 bp, Artificial Sequence
  source: /note="Description of Artificial Sequence: Synthetic polynucleotide"
atggctgccgatggttatcttccagattggctcgaggacaacctctctgagggcattcgcgagtggtgggcgctgaaacctggagccccgaagcccaaagccaaccagcaaaagcaggacgacggccggggtctggtgcttcctggctacaagtacctcggacccttcaacggactcgacaagggggagcccgtcaacgcggcggacgcggcggccctcgagcacgacaaggcctacgaccagcagctgcaggcgggtgacaatccgtacctgcggtataaccacgccgacgccgagtttcaggagcgtctgcaagaagatacgtcttttgggggcaacctcgggcgagcagtcttccaggccaagaagcgggttctcgaacctctcggtctggttgaggaaggcgctaagacggctcctggaaagaagagaccggtagagccatcaccccagcgttctccagactcctctacgggcatcggcaagaagggccaacagcccgccagaaaaagactcaattttggtcagactggcgactcagagtcagttccagaccctcaacctctcggagaacctccagcagcgccctctggtgtgggacctaatacaatggctgcaggcggtggcgcaccaatggcagacaataacgaaggcgccgacggagtgggtagttcctcgggaaattggcattgcgattccacatggctgggcgacagagtcatcaccaccagcacccgaacctgggccctgcccacctacaacaaccacctctacaagcaaatctccaacgggacatcgggaggagccaccaacgacaacgcctacttcggctacagcaccccctgggggtattttgactttaacagattccactgccacttttcaccacgtgactggcagcgactcatcaacaacaactggggattccggcccaagagactcagcttcaagctcttcaacatccaggtcaaggaggtcacgcagaatgaaggcaccaagaccatcgccaataacctcaccagcaccatccaggtgtttacggactcggagtaccagctgccgtacgttctcggctctgcccaccagggctgcctgcctccgttcccggcggacgtgttcacgattccccagtacggctacctaacactcaacaacggtagtcaggccgtgggacgctcctccttctactgcctggaatactttccttcgcagatgctgagaaccggcaacaacttccagtttacttacaccttcgaggacgtgcctttccacagcagctacgcccacagccagagcttggaccggctgatgaatcctctgattgaccagtacctgtactacttgtctcggattcaaacaacaggaggcacggcaaatacgcagactctgggcttcagccaaggtgggcctaatacaatggccaatcaggcaaagaactggctgccaggaccctgttaccgccaacaacgcgtctcaacgacaaccgggcaaaacaacaatagcaactttgcctggactgctgggaccaaataccatctgaatggaagaaattcattggctaatcctggcatcgctatggcaacacacaaagacgacgaggagcgtttttttcccagtaacgggatcctgatttttggcaaacaaaatgctgccagagacaatgcggattacagcgatgtcatgcccaccagcgaggaagaaatcaaaaccactaaccctgtggccacagaggaatacggtatcgtggcagataacttgcagcagcaaaacacggctcctcaaattggaactgtcaacagccagggggccttacccggtatggtctggcagaaccgggacgtgtacctgcagggtcccatctgggccaagattcctcacacggacggcaacttccacccgtctccgctgatgggcggctttggcctgaaacatcctccgcctcagatcctgatcaagaacacgcctgtacctgcggatcctccgaccaccttcaaccagtcaaagctgaactctttcatcacgcaatacagcaccggacaggtcagcgtggaaattgaatgggagctgcagaaggaaaacagcaagcgctggaaccccgagatccagtacacctccaactactacaaatctacaagtgtggactttgctgttaatacagaaggcgtgtactctgaaccccgccccattggcacccgttacctcacccgtaatctgtaa

SEQ ID NO: 12563 - DNA, 2217 bp, Artificial Sequence
  source: /note="Description of Artificial Sequence: Synthetic polynucleotide"
atggctgccgatggttatcttccagattggctcgaggacaacctctctgagggcattcgcgagtggtgggcgctgaaacctggagccccgaagcccaaagccaaccagcaaaagcaggacgacggccggggtctggtgcttcctggctacaagtacctcggacccttcaacggactcgacaagggggagcccgtcaacgcggcggacgcggcggccctcgagcacgacaaggcctacgaccagcagctgcaggcgggtgacaatccgtacctgcggtataaccacgccgacgccgagtttcaggagcgtctgcaagaagatacgtcttttgggggcaacctcgggcgagcagtcttccaggccaagaagcgggttctcgaacctctcggtctggttgaggaaggcgctaagacggctcctggaaagaagagaccggtagagccatcaccccagcgttctccagactcctctacgggcatcggcaagaagggccaacagcccgccagaaaaagactcaattttggtcagactggcgactcagagtcagttccagaccctcaacctctcggagaacctccagcagcgccctctggtgtgggacctaatacaatggctgcaggcggtggcgcaccaatggcagacaataacgaaggcgccgacggagtgggtagttcctcgggaaattggcattgcgattccacatggctgggcgacagagtcatcaccaccagcacccgaacctgggccctgcccacctacaacaaccacctctacaagcaaatctccaacgggacatcgggaggagccaccaacgacaacacctacttcggctacagcaccccctgggggtattttgactttaacagattccactgccacttttcaccacgtgactggcagcgactcatcaacaacaactggggattccggcccaagagactcagcttcaagctcttcaacatccaggtcaaggaggtcacgcagaatgaaggcaccaagaccatcgccaataacctcaccagcaccatccaggtgtttacggactcggagtaccagctgccgtacgttctcggctctgcccaccagggctgcctgcctccgttcccggcggacgtgttcacgattccccagtacggctacctaacactcaacaacggtagtcaggccgtgggacgctcctccttctactgcctggaatactttccttcgcagatgctgagaaccggcaacaacttccagtttacttacaccttcgaggacgtgcctttccacagcagctacgcccacagccagagcttggaccggctgatgaatcctctgattgaccagtacctgtactacttgtctcggattcaaacaacaggaggcacggcaaatacgcagactctgggcttcagccaaggtgggcctaatacaatggccaatcaggcaaagaactggctgccaggaccctgttaccgccaacaacgcgtctcaacgacaaccgggcaaaacaacaatagcaactttgcctggactgctgggaccaaataccatctgaatggaagaaattcattggctaatcctggcatcgctatggcaacacacaaagacgacgaggagcgtttttttcccagtaacgggatcctgatttttggcaaacaaaatgctgccagaggcaatgcggattacagcgatgtcatgcccaccagcgaggaagaaatcaaaaccactaaccctgtggccacagaggaatacggtatcgtggcagataacttgcagcagcaaaacacggctcctcaaattggaactgtcaacagccagggggccttacccggtatggtctggcagaaccgggacgtgtacctgcagggtcccatctgggccaagattcctcacacggacggcaacttccacccgtctccgctgatgggcggctttggcctgaaacatcctccgcctcagatcctgatcaagaacacgcctgtacctgcggatcctccgaccaccttcaaccagtcaaagctgaactctttcatcacgcaatacagcaccggacaggtcagcgtggaaattgaatgggagctgcagaaggaaaacagcaagcgctggaaccccgagatccagtacacctccaactactacaaatctacaagtgtggactttgctgttaatacagaaggcgtgtactctgaaccccgccccattggcacccgttacctcacccgtaatctgtaa

SEQ ID NO: 12564 - DNA, 2217 bp, Artificial Sequence
  source: /note="Description of Artificial Sequence: Synthetic polynucleotide"
atggctgccgatggttatcttccagattggctcgaggacaacctctctgagggcattcgcgagtggtgggcgctgaaacctggagccccgaagcccaaagccaaccagcaaaagcaggacgacggccggggtctggtgcttcctggctacaagtacctcggacccttcaacggactcgacaagggggagcccgtcaacgcggcggacgcggcggccctcgagcacgacaaggcctacgaccagcagctgcaggcgggtgacaatccgtacctgcggtataaccacgccgacgccgagtttcaggagcgtctgcaagaagatacgtcttttgggggcaacctcgggcgagcagtcttccaggccaagaagcgggttctcgaacctctcggtctggttgaggaaggcgctaagacggctcctggaaagaagagaccggtagagccatcaccccagcgttctccagactcctctacgggcatcggcaagaagggccaacagcccgccagaaaaagactcaattttggtcagactggcgactcagagtcagttccagaccctcaacctctcggagaacctccagcagcgccctctggtgtgggacctaatacaatggctgcaggcggtggcgcaccaatggcagacaataacgaaggcgccgacggagtgggtagttcctcgggaaattggcattgcgattccacatggctgggcgacagagtcatcaccaccagcacccgaacctgggccctgcccacctacaacaaccacctctacaagcaaatctccaacgggacatcgggaggagccaccaacgacaacacctacttcggctacagcaccccctgggggtattttgactttaacagattccactgccacttttcaccacgtgactggcagcgactcatcaacaacaactggggattccggcccaagagactcagcttcaagctcttcaacatccaggtcaaggaggtcacgcagaatgaaggcaccaagaccatcgccaataacctcaccagcaccatccaggtgtttacggactcggagtaccagctgccgtacgttctcggctctgcccaccagggctgcctgcctccgttcccggcggacgtgttcacgattccccagtacggctacctaacactcaacaacggtagtcaggccgtgggacgctcctccttctactgcctggaatactttccttcgcagatgctgggaaccggcaacaacttccagtttacttacaccttcgaggacgtgcctttccacagcagctacgcccacagccagagcttggaccggctgatgaatcctctgattgaccagtacctgtactacttgtctcggattcaaacaacaggaggcacggcaaatacgcagactctgggcttcagccaaggtgggcctaatacaatggccaatcaggcaaagaactggctgccaggaccctgttaccgccaacaacgcgtctcaacgacaaccgggcaaaacaacaatagcaactttgcctggactgctgggaccaaataccatctgaatggaagaaattcattggctaatcctggcatcgctatggcaacacacaaagacgacgaggagcgtttttttcccagtaacgggatcctgatttttggcaaacaaaatgctgccagagacaatgcggattacagcgatgtcatgcccaccagcgaggaagaaatcaaaaccactaaccctgtggccacagaggaatacggtatcgtggcagataacttgcagcagcaaaacacggctcctcaaattggaactgtcaacagccagggggccttacccggtatggtctggcagaaccgggacgtgtacctgcagggtcccatctgggccaagattcctcacacggacggcaacttccacccgtctccgctgatgggcggctttggcctgaaacatcctccgcctcagatcctgatcaagaacacgcctgtacctgcggatcctccgaccaccttcaaccagtcaaagctgaactctttcatcacgcaatacagcaccggacaggtcagcgtggaaattgaatgggagctgcagaaggaaaacagcaagcgctggaaccccgagatccagtacacctccaactactacaaatctacaagtgtggactttgctgttaatacagaaggcgtgtactctgaaccccgccccattggcacccgttacctcacccgtaatctgtaa

SEQ ID NO: 12565 - DNA, 2217 bp, Artificial Sequence
  source: /note="Description of Artificial Sequence: Synthetic polynucleotide"
atggctgccgatggttatcttccagattggctcgaggacaacctctctgagggcattcgcgagtggtgggcgctgaaacctggagccccgaagcccaaagccaaccagcaaaagcaggacgacggccggggtctggtgcttcctggctacaagtacctcggacccttcaacggactcgacaagggggagcccgtcaacgcggcggacgcggcggccctcgagcacgacaaggcctacgaccagcagctgcaggcgggtgacaatccgcacctgcggtataaccacgccgacgccgagtttcaggagcgtctgcaagaagatacgtcttttgggggcaacctcgggcgagcagtcttccaggccaagaagcgggttctcgaacctctcggtctggttgaggaaggcgctaagacggctcctggaaagaagagaccggtagagccatcaccccagcgttctccagactcctctacgggcatcggcaagaagggccaacagcccgccagaaaaagactcaattttggtcagactggcgactcagagtcagttccagaccctcaacctctcggagaacctccagcagcgccctctggtgtgggacctaatacaatggctgcaggcggtggcgcaccaatggcagacaataacgaaggcgccgacggagtgggtagttcctcgggaaattggcattgcgattccacatggctgggcgacagagtcatcaccaccagcacccgaacctgggccctgcccacctacaacaaccacctctacaagcaaatctccaacgggacatcgggaggagccaccaacgacaacacctacttcggctacagcaccccctgggggtattttgactttaacagattccactgccacttttcaccacgtgactggcagcgactcatcaacaacaactggggattccggcccaagagactcagcttcaagctcttcaacatccaggtcaaggaggtcacgcagaatgaaggcaccaagaccatcgccaataacctcaccagcaccatccaggtgtttacggactcggagtaccagctgccgtacgttctcggctctgcccaccagggctgcctgcctccgttcccggcggacgtgttcacgattccccagtacggctacctaacactcaacaacggtagtcaggccgtgggacgctcctccttctactgcctggaatactttccttcgcagatgctgagaaccggcaacaacttccagtttacttacaccttcgaggacgtgcctttccacagcagctacgcccacagccagagcttggaccggctgatgaatcctctgattgaccagtacctgtactacttgtctcggattcaaacaacaggaggcacggcaaatacgcagactctgggcttcagccaaggtgggcctaatacaatggccaatcaggcaaagaactggctgccaggaccctgttaccgccaacaacgcgtctcaacgacaaccgggcaaaacaacaatagcaactttgcctggactgctgggaccaaataccatctgaatggaagaaattcattggctaatcctggcatcgctatggcaacacacaaagacgacgaggagcgtttttttcccagtaacgggatcctgatttttggcaaacaaaatgctgccagagacaatgcggattacagcgatgtcatgcccaccagcgaggaagaaatcaaaaccactaaccctgtggccacagaggaatacggtatcgtggcagataacttgcagcagcaaaacacggctcctcaaattggaactgtcaacagccagggggccttacccggtatggtctggcagaaccgggacgtgtacctgcagggtcccatctgggccaagattcctcacacggacggcaacttccacccgtctccgctgatgggcggctttggcctgaaacatcctccgcctcagatcctgatcaagaacacgcctgtacctgcggatcctccgaccaccttcaaccagtcaaagctgaactctttcatcacgcaatacagcaccggacaggtcagcgtggaaattgaatgggagctgcagaaggaaaacagcaagcgctggaaccccgagatccagtacacctccaactactacaaatctacaagtgtggactttgctgttaatacagaaggcgtgtactctgaaccccgccccattggcacccgttacctcacccgtaatctgtaa

SEQ ID NO: 12566 - DNA, 2217 bp, Artificial Sequence
  source: /note="Description of Artificial Sequence: Synthetic polynucleotide"
atggctgccgatggttatcttccagattggctcgaggacaacctctctgagggcattcgcgagtggtgggcgctgaaacctggagccccgaagcccaaagccaaccagcaaaagcaggacgacggccggggtctggtgcttcctggctacaagtacctcggacccttcaacggactcgacaagggggagcccgtcaacgcggcggacgcggcggccctcgagcacgacaaggcctacgaccagcagctgcaggcgggtgacaatccgtacctgcggtataaccacgccgacgccgagtttcaggagcgtctgcaagaagatacgtcttttgggggcaacctcgggcgagcagtcttccaggccaagaagcgggttctcgaacctctcggtctggttgaggaaggcgctaagacggctcctggaaagaagagaccggtagagccatcaccccagcgttctccagactcctctacgggcatcggcaagaagggccaacagcccgccagaaaaagactcaattttggtcagactggcgactcagagtcagttccagaccctcaacctctcggagaacctccagcagcgccctctggtgtgggacctaatacaatggctgcaggcggtggcgcaccaatggcagacaataacgaaggcgccgacggagtgggtagttcctcgggaaattggcattgcgattccacatggctgggcgacagagtcatcaccaccagcacccgaacctgggccctgcccacctacaacaaccacctctacaagcaaatctccaacgggacatcgggaggagccaccaacgacaacacctacttcggctacagcaccccctgggggtattttgactttaacagattccactgccacttttcaccacgtgactggcagcgactcatcaacaacaactggggattccggcccaagagactcagcttcaagctcttcaacatccaggtcaaggaggtcacgcagaatgaaggcaccaagaccatcgccaataacctcaccagcaccatccaggtgtttacggactcggagtaccagctgccgtacgttctcggccctgcccaccagggctgcctgcctccgttcccggcggacgtgttcacgattccccagtacggctacctaacactcaacaacggtagtcaggccgtgggacgctcctccttctactgcctggaatactttccttcgcagatgctgagaaccggcaacaacttccagtttacttacaccttcgaggacgtgcctttccacagcagctacgcccacagccagagcttggaccggctgatgaatcctctgattgaccagtacctgtactacttgtctcggattcaaacaacaggaggcacggcaaatacgcagactctgggcttcagccaaggtgggcctaatacaatggccaatcaggcaaagaactggctgccaggaccctgttaccgccaacaacgcgtctcaacgacaaccgggcaaaacaacaatagcaactttgcctggactgctgggaccaaataccatctgaatggaagaaattcattggctaatcctggcatcgctatggcaacacacaaagacgacgaggagcgtttttttcccagtaacgggatcctgatttttggcaaacaaaatgctgccagagacaatgcggattacagcgatgtcatgcccaccagcgaggaagaaatcaaaaccactaaccctgtggccacagaggaatacggtatcgtggcagataacttgcagcagcaaaacacggctcctcaaattggaactgtcaacagccagggggccttacccggtatggtctggcagaaccgggacgtgtacctgcagggtcccatctgggccaagattcctcacacggacggcaacttccacccgtctccgctgatgggcggctttggcctgaaacatcctccgcctcagatcctgatcaagaacacgcctgtacctgcggatcctccgaccaccttcaaccagtcaaagctgaactctttcatcacgcaatacagcaccggacaggtcagcgtggaaattgaatgggagctgcagaaggaaaacagcaagcgctggaaccccgagatccagtacacctccaactactacaaatctacaagtgtggactttgctgttaatacagaaggcgtgtactctgaaccccgccccattggcacccgttacctcacccgtaatctgtaa

SEQ ID NO: 12567 - DNA, 2217 bp, Artificial Sequence
  source: /note="Description of Artificial Sequence: Synthetic polynucleotide"
atggctgccgatggttatcttccagattggctcgaggacaacctctctgagggcattcgcgagtggtgggcgctgaaacctggagccccgaagcccaaagccaaccagcaaaagcaggacgacggccggggtctggtgcttcctggctacaagtacctcggacccttcaacggactcgacaagggggagcccgtcaacgcggcggacgcggcggccctcgagcacgacaaggcctacgaccagcagctgcaggcgggtgacaatccgtacctgcggtataaccacgccgacgccgagtttcaggagcgtctgcaagaagatacgtcttttgggggcaacctcgggcgagcagtcttccaggccaagaagcgggttctcgaacctctcggtctggttggggaaggcgctaagacggctcctggaaagaagagaccggtagagccatcaccccagcgttctccagactcctctacgggcatcggcaagaagggccaacagcccgccagaaaaagactcaattttggtcagactggcgactcagagtcagttccagaccctcaacctctcggagaacctccagcagcgccctctggtgtgggacctaatacaatggctgcaggcggtggcgcaccaatggcagacaataacgaaggcgccgacggagtgggtagttcctcgggaaattggcattgcgattccacatggctgggcgacagagtcatcaccaccagcacccgaacctgggccctgcccacctacaacaaccacctctacaagcaaatctccaacgggacatcgggaggagccaccaacgacaacacctacttcggctacagcaccccctgggggtattttgactttaacagattccactgccacttttcaccacgtgactggcagcgactcatcaacaacaactggggattccggcccaagagactcagcttcaagctcttcaacatccaggtcaaggaggtcacgcagaatgaaggcaccaagaccatcgccaataacctcaccagcaccatccaggtgtttacggactcggagtaccagctgccgtacgttctcggctctgcccaccagggctgcctgcctccgttcccggcggacgtgttcacgattccccagtacggctacctaacactcaacaacggtagtcaggccgtgggacgctcctccttctactgcctggaatactttccttcgcagatgctgagaaccggcaacaacttccagtttacttacaccttcgaggacgtgcctttccacagcagctacgcccacagccagagcttggaccggctgatgaatcctctgattgaccagtacctgtactacttgtctcggattcaaacaacaggaggcacggcaaatacgcagactctgggcttcagccaaggtgggcctaatacaatggccaatcaggcaaagaactggctgccaggaccctgttaccgccaacaacgcgtctcaacgacaaccgggcaaaacaacaatagcaactttgcctggactgctgggaccaaataccatctgaatggaagaaattcattggctaatcctggcatcgctatggcaacacacaaagacgacgaggagcgtttttttcccagtaacgggatcctgatttttggcaaacaaaatgctgccagagacaatgcggattacagcgatgtcatgcccaccagcgaggaagaaatcaaaaccactaaccctgtggccacagaggaatacggtatcgtggcagataacttgcagcagcaaaacacggctcctcaaattggaactgtcaacagccagggggccttacccggtatggtctggcagaaccgggacgtgtacctgcagggtcccatctgggccaagattcctcacacggacggcaacttccacccgtctccgctgatgggcggctttggcctgaaacatcctccgcctcagatcctgatcaagaacacgcctgtacctgcggatcctccgaccaccttcaaccagtcaaagctgaactctttcatcacgcaatacagcaccggacaggtcagcgtggaaattgaatgggagctgcagaaggaaaacagcaagcgctggaaccccgagatccagtacacctccaactactacaaatctacaagtgtggactttgctgttaatacagaaggcgtgtactctgaaccccgccccattggcacccgttacctcacccgtaatctgtaa

SEQ ID NO: 12568 - DNA, 2217 bp, Artificial Sequence
  source: /note="Description of Artificial Sequence: Synthetic polynucleotide"
atggctgccgatggttatcttccagattggctcgaggacaacctctctgagggcattcgcgagtggtgggcgctgaaacctggagccccgaagcccaaagccaaccagcaaaagcaggacgacggccggggtctggtgcttcctggctacaagtacctcggacccttcaacggactcgacaagggggagcccgtcaacgcggcggacgcggcggccctcgagcacgacaaggcctacgaccagcagctgcaggcgggtgacaatccgtacctgcggtataaccacgccgacgccgagtttcaggagcgtctgcaagaagatacgtcttttgggggcaacctcgggcgagcagtcttccaggccaagaagcgggttctcgaacctctcggtctggttgaggaaggcgctaagacggctcctggaaagaagagaccggtagagccatcaccccagcgttctccagactcctctacgggcatcggcaagaagggccaacagcccgccagaaaaagactcaattttggtcagactggcgactcagagtcagttccagaccctcaacctctcggagaacctccagcagcgccctctggtgtgggacctaatacaatggctgcaggcggtggcgcaccaatggcagacaataacgaaggcgccgacggagtgggtagttcctcgggaaattggcattgcgattccacatggctgggcgacagagtcatcaccaccagcacccgaacctgggccctgcccacctacaacaaccacctctacaagcaaatctccaacgggacatcgggaggagccaccaacgacaacacctacttcggctacagcaccccctgggggtattttgactttaacagattccactgccacttttcaccacgtgactggcagcgactcatcaacaacaactggggattccggcccaagagactcagcttcaagctcttcaacatccaggtcaaggaggtcacgcagaatgaaggcaccaagaccatcgccaataacctcaccagcaccatccaggtgtttacggactcggagtaccagctgccgtacgttctcggctctgcccaccagggctgcctgcctccgttcccggcggacgtgttcacgattccccagtacggctacctaacactcaacaacggtagtcaggccgtgggacgctcctccttctactgcctggaatactttccttcgcagatgctgagaaccggcaacaacttccagtttacttacaccttcgaggacgtgcctttccacagcagctacgcccacagccagagcttggaccggctgatgaatcctctgattgaccagtacctgtactacttgtctcggattcaaacaacaggaggcacggcaaatacgcagactctgggcttcagccaaggtgggcctaatacaatggccaatcaggcaaagaactggctgccaggaccctgttaccgccaacaacgcgtctcaacgacaaccgggcaaaacaacaatagcaactttgcctggactgctgggaccaaataccatctgaatggaagaaattcattggctaatcctggcatcgctatggcaacacacaaagacgacgaggagcgtttttttcccagtaacgggatcctgatttttggcaaacaaaatgctgccagagacaatgcggattacagcgatgtcatgcccaccagcgaggaagaaatcaaaaccactaaccctgtggccacagaggaatacggtatcgtggcagataacttgcagcagcaaaacacggctcctcaaattggaactgtcaacagccagggggccttacccggtatggtctggcagaaccgggacgtgtacctgcagggtcccatctgggccaagattcctcacacggacggcaacttccacccgtctccgctgatgggcggctttggcctgaaacatcctccgcctcagatcctgatcaagaacacgcctgtacctgcggatcctccgaccaccttcaaccagtcaaagctgaactctttcatcacgcaatacagcaccggacaggtcagcgtggaaattgaatgggagctgcagaaggaaagcagcaagcgctggaaccccgagatccagtacacctccaactactacaaatctacaagtgtggactttgctgttaatacagaaggcgtgtactctgaaccccgccccattggcacccgttacctcacccgtaatctgtaa

SEQ ID NO: 12569 - DNA, 2217 bp, Artificial Sequence
  source: /note="Description of Artificial Sequence: Synthetic polynucleotide"
atggctgccgatggttatcttccagattggctcgaggacaacctctctgagggcattcgcgagtggtgggcgctgaaacctggagccccgaagcccaaagccaaccagcaaaagcaggacgacggccggggtctggtgcttcctggctacaagtacctcggacccttcaacggactcgacaagggggagcccgtcaacgcggcggacgcggcggccctcgagcacgacaaggcctacgaccagcagctgcaggcgggtgacaatccgtacctgcggtataaccacgccgacgccgagtttcaggagcgtctgcaagaagatacgtcttttgggggcaacctcgggcgagcagtcttccaggccaagaagcgggttctcgaacctctcggtctggttgaggaaggcgctaagacggctcctggaaagaagagaccggtagagccatcaccccagcgttctccagactcctctacgggcatcggcaagaagggccaacagcccgccagaaaaagactcaattttggtcagactggcgactcagagtcagttccagaccctcaacctctcggagaacctccagcagcgccctctggtgtgggacctaatacaatggctgcaggcggtggcgcaccaatggcagacaataacgaaggcgccgacggagtgggtagttcctcgggaaattggcattgcgattccacatggctgggcgacagagtcatcaccaccagcacccgaacctgggccctgcccacctacaacaaccacctctacaagcaaatctccaacgggacatcgggaggagccaccaacgacaacacctacttcggctacagcaccccctgggggtattttgactttaacagattccactgccacttttcaccacgtgactggcagcgactcatcaacaacaactggggattccggcccaagagactcagcttcaagctcttcaacatccaggtcaaggaggtcacgcagaatgaaggcaccaagaccatcgccaataacctcaccagcaccatccaggtgtttacggactcggagtaccagctgccgtacgttctcggctctgcccaccagggctgcctgcctccgttcccggcggacgtgttcacgattccccagtacggctacctaacactcaacaacggtagtcaggccgtgggacgctcctccttctactgcctggaatactttccttcgcagatgctgagaaccggcaacaacttccagtttacttacaccttcgaggacgtgcctttccacagcagctacgcccacagccagagcttggaccggctgatgaatcctctgattgaccagtacctgtactacttgtctcggattcaaacaacaggaggcacggcaaatacgcagactctgggcttcagccaaggtgggcctaatacaatggccaatcaggcaaagaactggctgccaggaccctgttaccgccaacaacgcgtctcaacgacaaccgggcaaaacaacaatagcaactttgcctggactgctgggaccaaataccatctgaatggaagaaattcattggctaatcctggcatcgctatggcaacacacaaagacgacgaggagcgtttttttcccagtaacgggatcctgatttttggcaaacaaaatgctgccagagacaatgcggattacagcgatgtcatgcccgccagcgaggaagaaatcaaaaccactaaccctgtggccacagaggaatacggtatcgtggcagataacttgcagcagcaaaacacggctcctcaaattggaactgtcaacagccagggggccttacccggtatggtctggcagaaccgggacgtgtacctgcagggtcccatctgggccaagattcctcacacggacggcaacttccacccgtctccgctgatgggcggctttggcctgaaacatcctccgcctcagatcctgatcaagaacacgcctgtacctgcggatcctccgaccaccttcaaccagtcaaagctgaactctttcatcacgcaatacagcaccggacaggtcagcgtggaaattgaatgggagctgcagaaggaaaacagcaagcgctggaaccccgagatccagtacacctccaactactacaaatctacaagtgtggactttgctgttaatacagaaggcgtgtactctgaaccccgccccattggcacccgttacctcacccgtaatctgtaa

SEQ ID NO: 12570 - DNA, 2217 bp, Artificial Sequence
  source: /note="Description of Artificial Sequence: Synthetic polynucleotide"
atggctgccgatggttatcttccagattggctcgaggacaacctctctgagggcattcgcgagtggtgggcgctgaaacctggagccccgaagcccaaagccaaccagcaaaagcaggacgacggccggggtctggtgcttcctggctacaagtacctcggacccttcaacggactcgacaagggggagcccgtcaacgcggcggacgcggcggccctcgagcacgacaaggcctacgaccagcagctgcaggcgggtgacaatccgtacctgcggtataaccacgccgacgccgagtttcaggagcgtctgcaagaagatacgtcttttgggggcaacctcgggcgagcagtcttccaggccaagaagcgggttctcgaacctctcggtctggttgaggaaggcgctaagacggctcctggaaagaagagaccggtagagccatcaccccagcgttctccagactcctctacgggcatcggcaagaagggccaacagcccgccagaaaaagactcaattttggtcagactggcgactcagagtcagttccagaccctcaacctctcggagaacctccagcagcgccctctggtgtgggacctaatacaatggctgcaggcggtggcgcaccaatggcagacaataacgaaggcgccgacggagtgggtagttcctcgggaaattggcattgcgattccacatggctgggcgacagagtcatcaccaccagcacccgaacctgggccctgcccacctacaacaaccacctctacaagcaaatctccaacgggacatcgggaggagccaccaacgacaacacctacttcggctacagcaccccctgggggtattttgactttaacagattccactgccacttttcaccacgtgactggcagcgactcatcaacaacaactggggattccggcccaagagactcagcttcaagctcttcaacatccaggtcaaggaggtcacgcagaatgaaggcaccaagaccatcgccaataacctcaccagcaccatccaggtgtttacggactcggagtaccagctgccgtacgttctcggctctgcccaccagggctgcctgcctccgttcccggcggacgtgctcacgattccccagtacggctacctaacactcaacaacggtagtcaggccgtgggacgctcctccttctactgcctggaatactttccttcgcagatgctgagaaccggcaacaacttccagtttacttacaccttcgaggacgtgcctttccacagcagctacgcccacagccagagcttggaccggctgatgaatcctctgattgaccagtacctgtactacttgtctcggattcaaacaacaggaggcacggcaaatacgcagactctgggcttcagccaaggtgggcctaatacaatggccaatcaggcaaagaactggctgccaggaccctgttaccgccaacaacgcgtctcaacgacaaccgggcaaaacaacaatagcaactttgcctggactgctgggaccaaataccatctgaatggaagaaattcattggctaatcctggcatcgctatggcaacacacaaagacgacgaggagcgtttttttcccagtaacgggatcctgatttttggcaaacaaaatgctgccagagacaatgcggattacagcgatgtcatgcccaccagcgaggaagaaatcaaaaccactaaccctgtggccacagaggaatacggtatcgtggcagataacttgcagcagcaaaacacggctcctcaaattggaactgtcaacagccagggggccttacccggtatggtctggcagaaccgggacgtgtacctgcagggtcccatctgggccaagattcctcacacggacggcaacttccacccgtctccgctgatgggcggctttggcctgaaacatcctccgcctcagatcctgatcaagaacacgcctgtacctgcggatcctccgaccaccttcaaccagtcaaagctgaactctttcatcacgcaatacagcaccggacaggtcagcgtggaaattgaatgggagctgcagaaggaaaacagcaagcgctggaaccccgagatccagtacacctccaactactacaaatctacaagtgtggactttgctgttaatacagaaggcgtgtactctgaaccccgccccattggcacccgttacctcacccgtaatctgtaa

SEQ ID NO: 12571 - DNA, 2217 bp, Artificial Sequence
  source: /note="Description of Artificial Sequence: Synthetic polynucleotide"
atggctgccgatggttatcttccagattggctcgaggacaacctctctgagggcattcgcgagtggtgggcgctgaaacctggagccccgaagcccaaagccaaccagcaaaagcaggacgacggccggggtctggtgcttcctggctacaagtacctcggacccttcaacggactcgacaagggggagcccgtcaacgcggcggacgcggcggccctcgagcacgacaaggcctacgaccagcagctgcaggcgggtgacaatccgtacctgcggtataaccacgccgacgccgagtttcaggagcgtctgcaagaagatacgtcttttgggggcaacctcgggcgagcagtcttccaggccaagaagcgggttctcgaacctctcggtctggttgaggaaggcgctaagacggctcctggaaagaagagaccggtagagccatcaccccagcgttctccagactcctctacgggcatcggcaagaagggccaacagcccgccagaaaaagactcaattttggtcagactggcgactcagagtcagttccagaccctcaacctctcggagaacctccagcagcgccctctggtgtgggacctaatacaatggctgcaggcggtggcgcaccaatggcagacaataacgaaggcgccgacggagtgggtagttcctcgggaaattggcattgcgattccacatggctgggcgacagagtcatcaccaccagcacccgaacctgggccctgcccacctacaacaaccacctctacaagcaaatctccaacgggacatcgggaggagccaccaacgacaacacctacttcggctacagcaccccctgggggtattttgactttaacagattccactgccacttttcaccacgtgactggcagcgactcatcaacaacaactggggattccggcccaagagactcagcttcaagctcttcaacatccaggtcaaggaggtcacgcagaatgaaggcaccaagaccatcgccaataacctcaccagcaccatccgggtgtttacggactcggagtaccagctgccgtacgttctcggctctgcccaccagggctgcctgcctccgttcccggcggacgtgttcacgattccccagtacggctacctaacactcaacaacggtagtcaggccgtgggacgctcctccttctactgcctggaatactttccttcgcagatgctgagaaccggcaacaacttccagtttacttacaccttcgaggacgtgcctttccacagcagctacgcccacagccagagcttggaccggctgatgaatcctctgattgaccagtacctgtactacttgtctcggattcaaacaacaggaggcacggcaaatacgcagactctgggcttcagccaaggtgggcctaatacaatggccaatcaggcaaagaactggctgccaggaccctgttaccgccaacaacgcgtctcaacgacaaccgggcaaaacaacaatagcaactttgcctggactgctgggaccaaataccatctgaatggaagaaattcattggctaatcctggcatcgctatggcaacacacaaagacgacgaggagcgtttttttcccagtaacgggatcctgatttttggcaaacaaaatgctgccagagacaatgcggattacagcgatgtcatgcccaccagcgaggaagaaatcaaaaccactaaccctgtggccacagaggaatacggtatcgtggcagataacttgcagcagcaaaacacggctcctcaaattggaactgtcaacagccagggggccttacccggtatggtctggcagaaccgggacgtgtacctgcagggtcccatctgggccaagattcctcacacggacggcaacttccacccgtctccgctgatgggcggctttggcctgaaacatcctccgcctcagatcctgatcaagaacacgcctgtacctgcggatcctccgaccaccttcaaccagtcaaagctgaactctttcatcacgcaatacagcaccggacaggtcagcgtggaaattgaatgggagctgcagaaggaaaacagcaagcgctggaaccccgagatccagtacacctccaactactacaaatctacaagtgtggactttgctgttaatacagaaggcgtgtactctgaaccccgccccattggcacccgttacctcacccgtaatctgtaa

SEQ ID NO: 12572 - DNA, 2217 bp, Artificial Sequence
  source: /note="Description of Artificial Sequence: Synthetic polynucleotide"
atggctgccgatggttatcttccagattggctcgaggacaacctctctgagggcattcgcgagtggtgggcgctgaaacctggagccccgaagcccaaagccaaccagcaaaagcaggacgacggccggggtctggtgcttcctggctacaagtacctcggacccttcaacggactcgacaagggggagcccgtcaacgcggcggacgcggcggccctcgagcacgacaaggcctacgaccagcagctgcaggcgggtgacaatccgtacctgcggtataaccacgccgacgccgagtttcaggagcgtctgcaagaagatacgtcttttgggggcaacctcgggcgagcagtcttccaggccaagaagcgggttctcgaacctctcggtctggttgaggaaggcgctaagacggctcctggaaagaagagaccggtagagccatcaccccagcgttctccagactcctctacgggcatcggcaagaagggccaacagcccgccagaaaaagactcaattttggtcagactggcgactcagagtcagttccagaccctcaacctctcggagaacctccagcagcgccctctggtgtgggacctaatacaatggctgcaggcggtggcgcaccaatggcagacaataacgaaggcgccgacggagtgggtagttcctcgggaaattggcattgcgattccacatggctgggcgacagagtcatcaccaccagcacccgaacctgggccctgcccacctacaacaaccacctctacaagcaaatctccaacgggacatcgggaggagccaccaacgacaacacctacttcggctacagcaccccctgggggtattttgactttaacagattccactgccacttttcaccacgtgactggcggcgactcatcaacaacaactggggattccggcccaagagactcagcttcaagctcttcaacatccaggtcaaggaggtcacgcagaatgaaggcaccaagaccatcgccaataacctcaccagcaccatccaggtgtttacggactcggagtaccagctgccgtacgttctcggctctgcccaccagggctgcctgcctccgttcccggcggacgtgttcacgattccccagtacggctacctaacactcaacaacggtagtcaggccgtgggacgctcctccttctactgcctggaatactttccttcgcagatgctgagaaccggcaacaacttccagtttacttacaccttcgaggacgtgcctttccacagcagctacgcccacagccagagcttggaccggctgatgaatcctctgattgaccagtacctgtactacttgtctcggattcaaacaacaggaggcacggcaaatacgcagactctgggcttcagccaaggtgggcctaatacaatggccaatcaggcaaagaactggctgccaggaccctgttaccgccaacaacgcgtctcaacgacaaccgggcaaaacaacaatagcaactttgcctggactgctgggaccaaataccatctgaatggaagaaattcattggctaatcctggcatcgctatggcaacacacaaagacgacgaggagcgtttttttcccagtaacgggatcctgatttttggcaaacaaaatgctgccagagacaatgcggattacagcgatgtcatgcccaccagcgaggaagaaatcaaaaccactaaccctgtggccacagaggaatacggtatcgtggcagataacttgcagcagcaaaacacggctcctcaaattggaactgtcaacagccagggggccttacccggtatggtctggcagaaccgggacgtgtacctgcagggtcccatctgggccaagattcctcacacggacggcaacttccacccgtctccgctgatgggcggctttggcctgaaacatcctccgcctcagatcctgatcaagaacacgcctgtacctgcggatcctccgaccaccttcaaccagtcaaagctgaactctttcatcacgcaatacagcaccggacaggtcagcgtggaaattgaatgggagctgcagaaggaaaacagcaagcgctggaaccccgagatccagtacacctccaactactacaaatctacaagtgtggactttgctgttaatacagaaggcgtgtactctgaaccccgccccattggcacccgttacctcacccgtaatctgtaa

SEQ ID NO: 12573 - DNA, 2217 bp, Artificial Sequence
  source: /note="Description of Artificial Sequence: Synthetic polynucleotide"
atggctgccgatggttatcttccagattggctcgaggacaacctctctgagggcattcgcgagtggtgggcgctgaaacctggagccccgaagcccaaagccaaccagcaaaagcaggacgacggccggggtctggtgcttcctggctacaagtacctcggacccttcaacggactcgacaagggggagcccgtcaacgcggcggacgcagcggccctcgagcacgacaaggcctacgaccagcagctgcaggcgggtgacaatccgtacctgcggtataaccacgccgacgccgagtttcaggagcgtctgcaagaagatacgtcttttgggggcaacctcgggcgagcagtcttccaggccaagaagcgggttctcgaacctctcggtctggttgaggaaggcgctaagacggctcctggaaagaagagaccggtagagccatcaccccagcgttctccagactcctctacgggcatcggcaagaaaggccaacagcccgccagaaaaagactcaattttggtcagactggcgactcagagtcagttccagaccctcaacctctcggagaacctccagcagcgccctctggtgtgggacctaatacaatggctgcaggcggtggcgcaccaatggcagacaataacgaaggcgccgacggagtgggtagttcctcgggaaattggcattgcgattccacatggctgggcgacagagtcatcaccaccagcacccgaacctgggccctgcccacctacaacaaccacctctacaagcaaatctccaacgggacatcgggaggagccaccaacgacaacacctacttcggctacagcaccccctgggggtattttgactttaacagattccactgccacttttcaccacgtgactggcagcgactcatcaacaacaactggggattccggcccaagagactcagcttcaagctcttcaacatccaggtcaaggaggtcacgcagaatgaaggcaccaagaccatcgccaataacctcaccagcaccatccaggtgtttacggactcggagtaccagctgccgtacgttctcggctctgcccaccagggctgcctgcctccgttcccggcggacgtgttcatgattccccagtacggctacctaacactcaacaacggtagtcaggccgtgggacgctcctccttctactgcctggaatactttccttcgcagatgctgagaaccggcaacaacttccagtttacttacaccttcgaggacgtgcctttccacagcagctacgcccacagccagagcttggaccggctgatgaatcctctgattgaccagtacctgtactacttgtctcggactcaaacaacaggaggcacggcaagtacgcagactctgggcttcagccaaggtgggcctaatacaatggccaatcaggcaaagaactggctgccaggaccctgttaccgccaacaacgcgtctcaacgacaaccgggcaaaacaacaatagcaactttgcctggactgctgggaccaaataccatctgaatggaagaaattcattggctaatcctggcatcgctatggcaacacacaaagacgacgaggagcgtttttttcccagtaacgggatcctgatttttggcaaacaaaatgctgccagagacaatgcggattacagcgatgtcatgctcaccagcgaggaagaaatcaaaaccactaaccctgtggctacagaggaatacggtatcgtggcagataacttgcagcagcaaaacacggctcctcaaattggaactgtcaacagccagggggccttacccggtatggtctggcagaaccgggacgtgtacctgcagggtcccatctgggccaagattcctcacacggacggcaacttccacccgtctccgctgatgggcggctttggcctgaaacatcctccgcctcagatcctgatcaagaacacgcctgtacctgcggatcctccgaccaccttcaaccagtcaaagctgaactctttcatcacgcaatacagcaccggacaggtcagcgtggaaattgaatgggagctgcagaaggaaaacagcaagcgctggaaccccgagatccagtacacctccaactactacaaatctacaagtgtggactttgctgttaatacagaaggcgtgtactctgaaccccgccccattggcacccgttacctcacccgtaatctgtaa

SEQ ID NO: 12574 - DNA, 2217 bp, Artificial Sequence
  source: /note="Description of Artificial Sequence: Synthetic polynucleotide"
atggctgccgatggttatcttccagattggctcgaggacaacctctctgagggcattcgcgagtggtgggcgctgaaacctggagccccgaagcccaaagccaaccagcaaaagcaggacgacggccggggtctggtgcttcctggctacaagtacctcggacccttcaacggactcgacaagggggagcccgtcaacgcggcggacgcagcggccctcgagcacgacaaggcctacgaccagcagctgcaggcgggtgacaatccgtacctgcggtataaccacgccgacgccgagtttcaggagcgtctgcaagaagatacgtcttttgggggcaacctcgggcgagcagtcttccaggccaagaagcgggttctcgaacctctcggtctggttgaggagggcgctaagacggctcctggaaagaagagaccggtagagccatcaccccagcgttctccagactcctctacgggcatcggcaagaaaggccaacagcccgccagaaaaagactcaattttggtcagactggcgactcagagtcagttccagaccctcaacctctcggagaacctccagcagcgccctctggtgtgggacctaatacaatggctgcaggcggtggcgcaccaatggcagacaataacgaaggcgccgacggagtgggtagttcctcgggaaattggcattgcgattccacatggctgggcgacagagtcatcaccaccagcacccgaacctgggccctgcccacctacaacaaccacctctacaagcaaatctccaacgggacatcgggaggagccaccaacgacaacacctacttcggctacagcaccccctgggggtattttgactttaacagattccactgccacttttcaccacgtgactggcagcgactcatcaacaacaactggggattccggcccaagagactcagcttcaagctcttcaacatccaggtcaaggaggtcacgcagaatgaaggcaccaagaccatcgccaataacctcaccagcaccatccaggtgtttacggactcggagtaccagctgccgtacgttctcggctctgcccaccagggctgcctgcctccgttcccggcggacgtgttcatgattccccagtacggctacctaacactcaacaacggtagtcaggccgtgggacgctcctccttctactgcctggaatactttccttcgcagatgctgagaaccggcaacaacttccagtttacttacaccttcgaggacgtgcctttccacagcagctacgcccacagccagagcttggaccggctgatgaatcctctgattgaccagtacctgtactacttgtctcggactcaaacaacaggaggcacggcaaatacgcagactctgggcttcagccaaggtgggcctaatacaatggccaatcaggcaaagaactggctgccaggaccctgttaccgccaacaacgcgtctcaacgacaaccgggcaaaacaacaatagcaactttgcctggactgctgggaccaaataccatctgaatggaagaaattcattggctaatcctggcatcgctatggcaacacacaaagacgacgaggagcgtttttttcccagtaacgggatcctgatttttggcaaacaaaatgctgccagagacaatgcggattacagcgatgtcatgctcaccagcgaggaagaaatcaaaaccactaaccctgtggctacagaggaatacggtatcgtggcagataacttgcagcagcaaaacacggctcctcaaattggaactgtcaacagccagggggccttacccggtatggtctggcagaaccgggacgtgtacctgcagggtcccatctgggccaagattcctcacacggacggcaacttccacccgtctccgctgatgggcggctttggcctgaaacatcctccgcctcagatcctgatcaagaacacgcctgtacctgcggatcctccgaccaccttcaaccagtcaaagctgaactctttcatcacgcaatacagcaccggacaggtcagcgtggaaattgaatgggagctgcagaaggaaaacagcaagcgctggaaccccgagatccagtacacctccaactactacaaatctacaagtgtggactttgctgttaatacagaaggcgtgtactctgaaccccgccccattggcacccgttacctcacccgtaatctgtaa

SEQ ID NO: 12575 - DNA, 2217 bp, Artificial Sequence
  source: /note="Description of Artificial Sequence: Synthetic polynucleotide"
atggctgccgatggttatcttccagattggctcgaggacaacctctctgagggcattcgcgagtggtgggcgctgaaacctggagccccgaagcccaaagccaaccagcaaaagcaggacgacggccggggtcaggtgcttcctggctacaagtacctcggacccttcaacggactcgacaagggggagcccgtcaacgcggcggacgcagcggccctcgagcacgacaaggcctacgaccagcagctgcaggcgggtgacaatccgtacctgcggtataaccacgccgacgccgagtttcaggagcgtctgcaagaagatacgtcttttgggggcaacctcgggcgagcagtcttccaggccaagaagcgggttctcgaacctctcggtctggttgaggaaggcgctaagacggctcctggaaagaagagaccggtagagccatcaccccagcgttctccagactcctctacgggcatcggcaagaaaggccaacagcccgccagaaaaagactcaattttggtcagactggcgactcagagtcagttccagaccctcaacctctcggagaacctccagcagcgccctctggtgtgggacctaatacaatggctgcaggcggtggcgcaccaatggcagacaataacgaaggcgccgacggagtgggtagttcctcgggaaattggcattgcgattccacatggctgggcgacagagtcatcaccaccagcacccgaacctgggccctgcccacctacaacaaccacctctacaagcaaatctccaacgggacatcgggaggagccaccaacgacaacacctacttcggctacagcaccccctgggggtattttgactttaacagattccactgccacttttcaccacgtgactggcagcgactcatcaacaacaactggggattccggcccaagagactcagcttcaagctcttcaacatccaggtcaaggaggtcacgcagaatgaaggcaccaagaccatcgccaataacctcaccagcaccatccaggtgtttacggactcggagtaccagctgccgtacgttctcggctctgcccaccagggctgcctgcctccgttcccggcggacgtgttcatgattccccagtacggctacctaacactcaacaacggtagtcaggccgtgggacgctcctccttctactgcctggaatactttccttcgcagatgctgagaaccggcaacaacttccagtttacttacaccttcgaggacgtgcctttccacagcagctacgcccacagccagagcttggaccggctgatgaatcctctgattgaccagtacctgtactacttgtctcggactcaaacaacaggaggcacggcaaatacgcagactctgggcttcagccaaggtgggcctaatacaatggccaatcaggcaaagaactggctgccaggaccctgttaccgccaacaacgcgtctcaacgacaaccgggcaaaacaacaatagcaactttgcctggactgctgggaccaaataccatctgaatggaagaaattcattggctaatcctggcatcgctatggcaacacacaaagacgacgaggagcgtttttttcccagtaacgggatcctgatttttggcaaacaaaatgctgccagagacaatgcggattacagcgatgtcatgctcaccagcgaggaagaaatcaaaaccactaaccctgtggctacagaggaatacggtatcgtggcagataacttgcagcagcaaaacacggctcctcaaattggaactgtcaacagccagggggccttacccggtatggtctggcagaaccgggacgtgtacctgcagggtcccgtctgggccaagattcctcacacggacggcaacttccacccgtctccgctgatgggcggctttggcctgaaacatcctccgcctcagatcctgatcaagaacacgcctgtacctgcggatcctccgaccaccttcaaccagtcaaagctgaactctttcatcacgcaatacagcaccggacaggtcagcgtggaaattgaatgggagctgcagaaggaaaacagcaagcgctggaaccccgagatccagtacacctccaactactacaaatctacaagtgtggactttgctgttaatacagaaggcgtgtactctgaaccccgccccattggcacccgttacctcacccgtaatctgtaa

SEQ ID NO: 12576 - DNA, 2217 bp, Artificial Sequence
  source: /note="Description of Artificial Sequence: Synthetic polynucleotide"
atggctgccgatggttatcttccagattggctcgaggacaacctctctgagggcattcgcgagtggtgggcgctgaaacctggagccccgaagcccaaagccaaccagcaaaagcaggacgacggccggggtctggtgcttcctggctacaagtacctcggacccttcaacggactcgacaagggggagcccgtcaacgcggcggacgcagcggccctcgagcacgacaaggcctacgaccagcagctgcaggcgggtgacaatccgtacctgcggtataaccacgccgacgccgagtttcaggagcgtctgcaagaagatacgtcttttgggggcaacctcgggcgagcagtcttccaggccaagaagcgggttctcgaacctctcggtctggttgaggaaggcgctaagacggctcctggaaagaagagaccggtagagccatcaccccagcgttctccagactcctctacgggcatcggcaagaaaggccaacagcccgccagaaaaagactcaattttggtcagactggcgactcagagtcagttccagaccctcaacctctcggagaacctccagcagcgccctctggtgtgggacctaatacaatggctgcaggcggtggcgcaccaatggcagacaataacgaaggcgccgacggagtgggtagttcctcgggaaattggcattgcgattccacatggctgggcgacagagtcatcaccaccagcacccgaacctgggccctgcccacctacaacaaccacctctacaagcaaatctccaacgggacatcgggaggagccaccaacgacaacacctacttcggctacagcaccccctgggggtattttgactttaacagattccactgccacttttcaccacgtgactggcagcgactcatcaacagcaactggggattccggcccaagagactcagcttcaagctcttcaacatccaggtcaaggaggtcacgcagaatgaaggcaccaagaccatcgccaataacctcaccagcaccatccaggtgtttacggactcggagtaccagctgccgtacgttctcggctctgcccaccagggctgcctgcctccgttcccggcggacgtgttcatgattccccagtacggctacctaacactcaacaacggtagtcaggccgtgggacgctcctccttctactgcctggaatactttccttcgcagatgctgagaaccggcaacaacttccagtttacttacaccttcgaggacgtgcctttccacagcagctacgcccacagccagagcttggaccggctgatgaatcctctgattgaccagtacctgtactacttgtctcggactcaaacaacaggaggcacggcaaatacgcagactctgggcttcagccaaggtgggcctaatacaatggccaatcaggcaaagaactggctgccaggaccctgttaccgccaacaacgcgtctcaacgacaaccgggcaaaacaacaatagcaactttgcctggactgctgggaccaaataccatctgaatggaagaaattcattggctaatcctggcatcgctatggcaacacacaaagacgacgaggagcgtttttttcccagtaacgggatcctgatttttggcaaacaaaatgctgccagagacaatgcggattacagcgatgtcatgctcaccagcgaggaagaaatcaaaaccactaaccctgtggctacagaggaatacggtatcgtggcagataacttgcagcagcaaaacacggctcctcaaattggaactgtcaacagccagggggccttacccggtatggtctggcagaaccgggacgtgtacctgcagggtcccatctgggccaagattcctcacacggacggcaacttccacccgtctccgctgatgggcggctttggcctgaaacatcctccgcctcagatcctgatcaagaacacgcctgtacctgcggatcctccgaccaccttcaaccagtcaaagctgaactctttcatcacgcaatacagcaccggacaggtcagcgtggaaattgaatgggagctgcagaaggaaaacagcaagcgctggaaccccgagatccagtacacctccaactactacaaatctacaagtgtggactttgctgttaatacagaaggcgtgtactctgaaccccgccccattggcacccgttacctcacccgtaatctgtaa

SEQ ID NO: 12577 - DNA, 2217 bp, Artificial Sequence
  source: /note="Description of Artificial Sequence: Synthetic polynucleotide"
atggctgccgatggttatcttccagattggctcgaggacaacctctctgagggcattcgcgagtggtgggcgctgaaacctggagccccgaagcccaaagccaaccagcaaaagcaggacgacggccggggtctggtgcttcctggctacaagtacctcggacccttcaacggactcgacaagggggagcccgtcaacgcggcggacgcagcggccctcgagcacgacaaggcctacgaccagcagctgcaggcgggtgacaatccgtacctgcggtataaccacgccgacgccgagtttcaggagcgtctgcaagaagatacgtcttttgggggcaacctcgggcgagcagtcttccaggccaagaagcgggttctcgaacctctcggtctggttgaggagggcgctaagacggctcctggaaagaagagaccggtagagccatcaccccagcgttctccagactcctctacgggcatcggcaagaaaggccaacagcccgccagaaaaagactcaattttggtcagactggcgactcagagtcagttccagaccctcaacctctcggagaacctccagcagcgccctctggtgtgggacctaatacaatggctgcaggcggtggcgcaccaatggcagacaataacgaaggcgccgacggagtgggtagttcctcgggaaattggcattgcgattccacatggctgggcgacagagtcatcaccaccagcacccgaacctgggccctgcccacctacaacaaccacctctacaagcaaatctccaacgggacatcgggaggagccaccaacgacaacacctacttcggctacagcaccccctgggggtattttgactttaacagattccactgccacttttcaccacgtgactggcagcgactcatcaacaacaactggggattccggcccaagagactcagcttcaagctcttcaacatccaggtcaaggaggtcacgcagaatgaaggcaccaagaccatcgccaataacctcaccagcaccatccaggtgtttacggactcggagtaccagctgccgtacgttctcggctctgcccaccagggctgcctgcctccgttcccggcggacgtgttcacgattccccagtacggctacctaacactcaacaacggtagtcaggccgtgggacgctcctccttctactgcctggaatactttccttcgcagatgctgagaaccggcaacaacttccagtttacttacaccttcgaggacgtgcctttccacagcagctacgcccacagccagagcttggaccggctgatgaatcctctgattgaccagtacctgtactacttgtctcggactcaaacaacaggaggcacggcaaatacgcagactctgggcttcagccaaggtgggcctaatacaatggccaatcaggcaaagaactggctgccaggaccctgttaccgccaacaacgcgtctcaacgacaaccgggcaaaacaacaatagcaactttgcctggactgctgggaccaaataccatctgaatggaagaaattcattggctaatcctggcatcgctatggcaacacacaaagacgacgaggagcgtttttttcccagtaacgggatcctgatttttggcaaacaaaatgctgccagagacaatgcggattacagcgatgtcatgctcaccagcgaggaagaaatcaaaaccactaaccctgtggctacagaggaatacggtatcgtggcagataacttgcagcagcaaaacacggctcctcaaattggaactgtcaacagccagggggccttacccggtatggtctggcagaaccgggacgtgtacctgcagggtcccatctgggccaagattcctcacacggacggcaacttccacccgtctccgctgatgggcggctttggcctgaaacatcctccgcctcagatcctgatcaagaacacgcctgtacctgcggatcctccgaccaccttcaaccagtcaaagctgaactctttcatcacgcaatacagcaccggacaggtcagcgtggaaattgaatgggagctgcagaaggaaaacagcaagcgctggaaccccgagatccagtacacctccaactactacaaatctacaagtgtggactttgctgttaatacagaaggcgtgtactctgaaccccgccccattggcacccgttacctcacccgtaatctgtaa

SEQ ID NO: 12578 - DNA, 2217 bp, Artificial Sequence
  source: /note="Description of Artificial Sequence: Synthetic polynucleotide"
atggctgccgatggttatcttccagattggctcgaggacaacctctctgagggcattcgcgagtggtgggcgctgaaacctggagccccgaagcccaaagccaaccagcaaaagcaggacgacggccggggtctggtgcttcctggctacaagtacctcggacccttcaacggactcgacaagggggagcccgtcaacgcggcggacgcagcggccctcgagcacgacaaggcctacgaccagcagctgcaggcgggtgacaatccgtacctgcggtataaccacgccgacgccgagtttcaggagcgtctgcaagaagatacgtcttttgggggcaacctcgggcgagcagtcttccaggccaagaagcgggttctcgaacctctcggtctggttgaggaaggcgctaagacggctcctggaaagaagagaccggtagagccatcaccccagcgttctccagactcctctacgggcatcggcaagaaaggccaacagcccgccagaaaaagactcaattttggtcagactggcgactcagagtcagttccagaccctcaacctctcggagaacctccagcagcgccctctggtgtgggacctaatacaatggctgcaggcggtggcgcaccaatggcagacaataacgaaggcgccgacggagtgggtagttcctcgggaaattggcattgcgattccacatggctgggcgacagagtcatcaccaccagcacccgaacctgggccctgcccacctacaacaaccacctctacaagcaaatctccaacgggacatcgggaggagccaccaacgacaacacctacttcggctacagcaccccctgggggtattttgactttaacagattccactgccacttttcaccacgtgactggcagcgactcatcgacaacaactggggattccggcccaagagactcagcttcaagctcttcaacatccaggtcaaggaggtcacgcagaatgaaggcaccaagaccatcgccaataacctcaccagcaccatccaggtgtttacggactcggagtaccagctgccgtacgttctcggctctgcccaccagggctgcctgcctccgttcccggcggacgtgttcatgattccccagtacggctacctaacactcaacaacggtagtcaggccgtgggacgctcctccttctactgcctggaatactttccttcgcagatgctgagaaccggcaacaacttccagtttacttacaccttcgaggacgtgcctttccacagcagctacgcccacagccagagcttggaccggctgatgaatcctctgattgaccagtacctgtactacttgtctcggactcaaacaacaggaggcacggcaaatacgcagactctgggcttcagccaaggtgggcctaatacaatggccaatcaggcaaagaactggctgccaggaccctgttaccgccaacaacgcgtctcaacgacaaccgggcaaaacaacaatagcaactttgcctggactgctgggaccaaataccatctgaatggaagaaattcattggctaatcctggcatcgctatggcaacacacaaagacgacgaggagcgtttttttcccagtaacgggatcctgatttttggcaaacaaaatgctgccagagacaatgcggattacagcgatgtcatgctcaccagcgaggaagaaatcaaaaccactaaccctgtggctacagaggaatacggtatcgtggcagataacttgcagcagcaaaacacggctcctcaaattggaactgtcaacagccagggggccttacccggtatggtctggcagaaccgggacgtgtacctgcagggtcccatctgggccaagattcctcacacggacggcaacttccacccgtctccgctgatgggcggctttggcctgaaacatcctccgcctcagatcctgatcaagaacacgcctgtacctgcggatcctccgaccaccttcaaccagtcaaagctgaactctttcatcacgcaatacagcaccggacaggtcagcgtggaaattgaatgggagctgcagaaggaaaacagcaagcgctggaaccccgagatccagtacacctccaactactacaaatctacaagtgtggactttgctgttaatacagaaggcgtgtactctgaaccccgccccattggcacccgttacctcacccgtaatctgtaa

SEQ ID NO: 12579 - DNA, 2217 bp, Artificial Sequence
  source: /note="Description of Artificial Sequence: Synthetic polynucleotide"
atggctgccgatggttatcttccagattggctcgaggacaacctctctgagggcattcgcgagtggtgggcgctgaaacctggagccccgaagcccaaagccaaccagcaaaagcaggacgacggccggggtctggtgcttcctggctacaagtacctcggacccttcaacggactcgacaagggggagcccgtcaacgcggcggacgcagcggccctcgagcacgacaaggcctacgaccagcagctgcaggcgggtgacaatccgtacctgcggtataaccacgccgacgccgagtttcaggagcgtctgcaagaagatacgtcttttgggggcaacctcgggcgagcagtcttccaggccaagaagcgggttctcgaacctctcggtctggttgaggaaggcgctaagacggctcctggaaagaagagaccggtagagccatcaccccagcgttctccagactcctctacgggcatcggcaagaaaggccaacagcccgccagaaaaagactcaattttggtcagactggcgactcagagtcagttccagaccctcaacctctcggagaacctccagcagcgccctctggtgtgggacctaatacaatggctgcaggcggtggcgcaccaatggcagacaataacgaaggcgccgacggagtgggtagttcctcgggaaattggcattgcgattccacatggctgggcgacagagtcatcaccaccagcacccgaacctgggccctgcccgcctacaacaaccacctctacaagcaaatctccaacgggacatcgggaggagccaccaacgacaacacctacttcggctacagcaccccctgggggtattttgactttaacagattccactgccacttttcaccacgtgactggcagcgactcatcaacaacaactggggattccggcccaagagactcagcttcaagctcttcaacatccaggtcaaggaggtcacgcagaatgaaggcaccaagaccatcgccaataacctcaccagcaccatccaggtgtttacggactcggagtaccagctgccgtacgttctcggctctgcccaccagggctgcctgcctccgttcccggcggacgtgttcacgattccccagtacggctacctaacactcaacaacggtagtcaggccgtgggacgctcctccttctactgcctggaatactttccttcgcagatgctgagaaccggcaacaacttccagtttacttacaccttcgaggacgtgcctttccacagcagctacgcccacagccagagcttggaccggctgatgaatcctctgattgaccagtacctgtactacttgtctcggactcaaacaacaggaggcacggcaaatacgcagactctgggcttcagccaaggtgggcctaatacaatggccaatcaggcaaagaactggctgccaggaccctgttaccgccaacaacgcgtctcaacgacaaccgggcaaaacaacaatagcaactttgcctggactgctgggaccaaataccatctgaatggaagaaattcattggctaatcctggcatcgctatggcaacacacaaagacgacgaggagcgtttttttcccagtaacgggatcctgatttttggcaaacaaaatgctgccagagacaatgcggattacagcgatgtcatgctcaccagcgaggaagaaatcaaaaccactaaccctgtggctacagaggaatacggtatcgtggcagataacttgcagcagcaaaacacggctcctcaaattggaactgtcaacagccagggggccttacccggtatggtctggcagaaccgggacgtgtacctgcagggtcccatctgggccaagattccacacacggacggcaacttccacccgtctccgctgatgggcggctttggcctgaaacatcctccgcctcagatcctgatcaagaacacgcctgtacctgcggatcctccgaccaccttcaaccagtcaaagctgaactctttcatcacgcaatacagcaccggacaggtcagcgtggaaattgaatgggagctgcagaaggaaaacagcaagcgctggaaccccgagatccagtacacctccaactactacaaatctacaaatgtggactttgctgttaatacagaaggcgtgtactctgaaccccgccccattggcacccgttacctcacccgtaatctgtaa

SEQ ID NO: 12580 - DNA, 2217 bp, Artificial Sequence
  source: /note="Description of Artificial Sequence: Synthetic polynucleotide"
atggctgccgatggttatcttccagattggctcgaggacaacctctctgagggcattcgcgagtggtgggcgctgaaacctggagccccgaagcccaaagccaaccagcaaaagcaggacgacggccggggtctggtgcttcctggctacaagtacctcggacccttcaacggactcgacaagggggagcccgtcaacgcggcggacgcagcggccctcgagcacgacaaggcctacgaccagcagctgcaggcgggtgacaatccgtacctgcggtataaccacgccgacgccgagtttcaggagcgtctgcaagaagatacgtcttttgggggcaacctcgggcgagcagtcttccaggccaagaagcgggttctcgaacctctcggtctggttgaggaaggcgctaagacggctcctggaaagaagagaccggtagagccatcaccccagcgttctccagactcctctacgggcatcggcaagaaaggccaacagcccgccagaaaaagactcaattttggtcagactggcgactcagagtcagttccagaccctcaacctctcggagaacctccagcagcgccctctggtgtgggacctaatacaatggctgcaggcggtggcgcaccaatggcagacaataacgaaggcgccgacggagtgggtagttcctcgggaaattggcattgcgattccacatggctgggcgacagagtcatcaccaccagcacccgaacctgggccctgcccacctacaacaaccacctctacaagcaaatctccaacgggacatcgggaggagccaccaacgacaacacctacttcggctacagcaccccctgggggtattttgactttaacagattccactgccacttttcaccacgtgactggcagcgactcatcaacaacaactggggattccggcccaagagactcagcttcaagctcttcaacatccaggtcaaggaggtcacgcagaatgaaggcaccaagaccatcgccaataacctcaccagcaccatccaggtgtttacggactcggagtaccagctgccgtacgttctcggctctgcccaccagggctgcctgcctccgttcccggcggacgtgttcatgattccccagtacggctacctaacactcaacgacggtagtcaggccgtgggacgctcctccttctactgcctggaatactttccttcgcagatgctgagaaccggcaacaacttccagtttacttacaccttcgaggacgtgcctttccacagcagctacgcccacagccagagcttggaccggctgatgaatcctctgattgaccagtacctgtactacttgtctcggactcaaacaacaggaggcacggcaaatacgcagactctgggcttcagccaaggtgggcctaatacaatggccaatcaggcaaagaactggctgccaggaccctgttaccgccaacaacgcgtctcaacgacaaccgggcaaaacaacaatagcaactttgcctggactgctgggaccaaataccatctgaatggaagaaattcattggctaatcctggcatcgctatggcaacacacaaagacgacgaggagcgtttttttcccagtaacgggatcctgatttttggcaaacaaaatgctgccagagacaatgcggattacagcgatgtcatgctcaccagcgaggaagaaatcaaaaccactaaccctgtggctacagaggaatacggtatcgtggcagataacttgcagcagcaaaacacggctcctcaaattggaactgtcaacagccagggggccttacccggtatggtctggcagaaccgggacgtgtacctgcagggtcccatctgggccaagattcctcacacggacggcaacttccacccgtctccgctgatgggcggctttggcctgaaacatcctccgcctcagatcctgatcaagaacacgcctgtacctgcggatcctccgaccaccttcaaccagtcaaagctgaactctttcatcacgcaatacagcaccggacaggtcagcgtggaaattgaatgggagctgcagaaggaaaacagcaagcgctggaaccccgagatccagtacacctccaactactacaaatctacaagtgtggactttgctgttaatacagaaggcgtgtactctgaaccccgccccattggcacccgttacctcacccgtaatctgtaa

SEQ ID NO: 12581 - DNA, 2217 bp, Artificial Sequence
  source: /note="Description of Artificial Sequence: Synthetic polynucleotide"
atggctgccgatggttatcttccagattggctcgaggacaacctctctgagggcattcgcgagtggtgggcgctgaaacctggagccccgaagcccaaagccaaccagcaaaagcaggacgacggccggggtctggtgcttcctggctacaagtacctcggacccttcaacggactcgacaagggggagcccgtcaacgcggcggacgcagcggccctcgagcacgacaaggcctacgaccagcagctgcaggcgggtgacaatccgtacctgcggtataaccacgccgacgccgagtttcaggagcgtctgcaagaagatacgtcttttgggggcaacctcgggcgagcagtcttccaggccaagaagcgggttctcgaacctctcggtctggttgaggaaggcgctaagacggctcctggaaagaagagaccggtagagccatcaccccagcgttctccagactcctctacgggcatcggcaagaaaggccaacagcccgccagaaaaagactcaattttggtcagactggcgactcagagtcagttccagaccctcaacctctcggagaacctccagcagcgccctctggtgtgggacctaatacaatggctgcaggcggtggcgcaccaatggcagacaataacgaaggcgccgacggagtgggtagttcctcgggaaattggcattgcgattccacatggctgggcgacagagtcatcaccaccagcacccgaacctgggcccagcccacctacaacaaccacctctacaagcaaatctccaacgggacatcgggaggagccaccaacgacaacacctacttcggctacagcaccccctgggggtattttgactttaacagattccactgccacttttcaccacgtgactggcagcgactcatcaacaacaactggggattccggcccaagagactcagcttcaagctcttcaacatccaggtcaaggaggtcacgcagaatgaaggcaccaagaccatcgccaataacctcaccagcaccatccaggtgtttacggactcggagtaccagctgccgtacgttctcggctctgcccaccagggctgcctgcctccgttcccggcggacgtgttcatgattccccagtacggctacctaacactcaacaacggtagtcaggccgtgggacgctcctccttctactgcctggaatactttccttcgcagatgctgagaaccggcaacaacttccagtttacttacaccttcgaggacgtgcctttccacagcagctacgcccacagccagagcttggaccggctgatgaatcctctgattgaccagtacctgtactacttgtctcggactcaaacaacaggaggcacggcaaatacgcagactctgggcttcagccaaggtgggcctaatacaatggccaatcaggcaaagaactggctgccaggaccctgttaccgccaacaacgcgtctcaacgacaaccgggcaaaacaacaatagcaactttgcctggactgctgggaccaaataccatctgaatggaagaaattcattggctaatcctggcatcgctatggcaacacacaaagacgacgaggagcgtttttttcccagtaacgggatcctgatttttggcaaacaaaatgctgccagagacaatgcggattacagcgatgtcatgctcaccagcgaggaagaaatcaaaaccactaaccctgtggctacagaggaatacggtatcgtggcagataacttgcagcagcaaaacacggctcctcaaattggaactgtcaacagccagggggccttacccggtatggtctggcagaaccgggacgtgtacctgcagggtcccatctgggccaagattcctcacacggacggcaacttccacccgtctccgctgatgggcggctttggcctgaaacatcctccgcctcagatcctgatcaagaacacgcctgtacctgcggatcctccgaccaccttcaaccagtcaaagctgaactctttcatcacgcaatacagcaccggacaggtcagcgtggaaattgaatgggagctgcagaaggaaaacagcaagcgctggaaccccgagatccagtacacctccaactactacaaatctacaagtgtggactttgctgttaatacagaaggcgtgtactctgaaccccgccccattggcacccgttacctcacccgtaatctgtaa

SEQ ID NO: 12582 - DNA, 2208 bp, Artificial Sequence
  source: /note="Description of Artificial Sequence: Synthetic polynucleotide"
atggctgccgatggttatcttccagattggctcgaggacactctctctgaaggaataagacagtggtggaagctcaaacctggcccaccaccgccaaagcccgcagagcggcataaggacgacagcaggggtcttgtgcttcctgggtacaagtacctcggacccttcaacggactcgacaaaggagagccggtcaacgaggcagacgccgcggccctcgagcacgacaaggcctacgaccggcagctcgacagcggagacaacccgtacctcaagtacaaccacgccgacgcggagtttcaggagcgccttaaagaagatacgtcttttgggggcaacctcggacgagcagtcttccaggcgaaaaagagggttcttgaacctctgggcctggttgaggaacctgttaagacggctccgggaaaaaagaggccggtagagcactctcctgcggagccagactcctcctcgggaaccggaaaggcgggccagcagcctgcgagaaagagattgaatttcggtcagactggagacgcagactccgtacctgacccccagcctctcggacagccaccagcagccccctctggtctgggaactaatacgatggctacaggcagtggcgcaccaatggcagacaataacgagggcgccgacggagtgggtaattcctcgggaaattggcattgcgattccacatggatgggcgacagagtcatcaccaccagcacccgcacctgggctctgcccacctacaacaaccatctgtacaagcaaatttccagccaatcaggagcatcgaacgacaaccactactttggctacagcaccccctgggggtattttgacttcaacagattccactgccacttttcgccacgtgactggcaaagactcatcaacaacaactggggattccggcccaagagactcagcttcaagctctttaacattcaagtcaaggaggtcacgcagaatgacggtacgacgacgattgccaataaccttaccagcacggttcaggtctttactgactcggagtaccagctcccgtacgtcctcggctcggcgcatcaaggatgcctcccgccgtttccagcggacgtcttcatggtcccacagtatggatacctcaccctgaacaacgggagtcaggcggtaggacgctcttccttttactgcctggagtactttccttctcagatgcttcgtactggaaacaactttaccttcagctacacctttgaagacgttcctttccacagcagctacgctcacagccaaagtctggaccgtctcatgaatcctctcatcgaccagtacctgtattacttgagcaaaacaaacgctccaagcggaaccaccacgatgtccaggcttcagttttctcaggccggagcaagtgacattcgggaccagtctagaaactggcttcctggaccctgttaccgccagcagcgagtatcaaagacagctgcggacaacaacaacagtgattactcgtggactggagctaccaagtaccacctcaatggaagagactctctggtgaacccgggcccagctatggccagccacaaggacgatgaagaaaaatattttcctcagagcggggttctcatcttcgggaaacaaggctcaaataaaactaatgtggacattgaaaaggtcatgattacagacgaagaggaaatcaggaccaccaatcccgtggctacggagcagtacggtgctgtatctaccaaccttcaaagcggcaacacacaagcagctacctcagatgtcaacacacaaggcgttcttcctggcatggtctggcaggacagagacgtgtacctgcaggggcccatctgggcaaagattccccacacggatggacactttcacccttctcctcttatgggaggatttggattgaagcaccctcccccacagattctcatcaagaataccccggtacctgcgaatccttctaccaccttcagtgcggcaaagtttgcttctttcatcacacagtactccacagggcaggtcagcgtggagatcgagtgggagctgcagaaagagaacagcaaacgctggaaccccgagattcagtatacctccaactacaacaagtctgttaatgtggactttactgtggacactaatggcgtgtattcagagcctcgccccattggcacaagatacctgactcgtaatctgtaa

SEQ ID NO: 12583 - DNA, 2208 bp, Artificial Sequence
  source: /note="Description of Artificial Sequence: Synthetic polynucleotide"
atggctgccgatggttatcttccagattggctcgaggacactctctctgaaggaataagacagtggtggaagctcaaacctggcccaccaccgccaaagcccgcagagcggcataaggacgacagcaggggtcttgtgcttcctgggtacaagtacctcggacccttcaacggactcgacaaaggagagccggtcaacgaggcagacgccgcggccctcgagcacgacaaggcctacgaccggcagctcgacagcggagacaacccgtacctcaagtacaaccacgccgacgcggagtttcaggagcgccttaaagaagatacgtcttttgggggcaacctcggacgagcagtcttccaggcgaaaaagagggttcttgaacctctgggcctggttgaggaacctgttaagacggctccgggaaaaaagaggccggtagagcactctcctgcggagccagactcctcctcgggaaccggaaaggcgggccagcagcctgcgagaaagagattgaatttcggtcagactggagacgcagactccgtacctgacccccagcctctcggacagccaccagcagccccctctggtctgggaactaatacgatggctacaggcagtggcgcaccaatggcagacaataacgagggcgccgacggagtgggtaattcctcgggaaattggcattgcgattccacatggatgggcgacagagtcatcaccaccagcacccgcacctgggctctgcccacctacaacaaccatctgtacaagcaaatttccagccaatcaggagcatcgaacgacaaccactactttggctacagcaccccctgggggtattttgacttcaacagattccactgccacttttcgccacgtgactggcaaagactcatcaacaacaactggggattccggcccaagagactcagcttcaagctctttaacattcaagtcaaggaggtcacgcagaatgacggtacgacgacgattgccaataaccttaccagcacggttcaggtctttactgactcggagtaccagctcccgtacgtcctcggctcggcgcatcaaggatgcctcccgccgtttccagcggacgtcttcatggtcccacagtatggatacctcaccctgaacaacgggagtcaggcggtaggacgctcttccttttactgcctggagtactttccttctcagatgcttcgtactggaaacaactttaccttcagctacacctttgaagacgttcctttccacagcagctacgctcacagccaaagtctggaccgtctcatgaatcctctcatcgaccagtacctgtattacttgagcaaaacaaacgctccaagcggaaccaccacgatgtccaggcttcagttttctcaggccggagcaagtgacattcgggaccagtctagaaactggcttcctggaccctgttaccgccagcagcgagtatcaaagacagctgcggacaacaacaacagtgattactcgtggactggagctaccaagtaccacctcaatggaagagactctctggtgaacccgggcccagctatggccagccacaaggacgatgaagaaaaaatatttcctcagagcggggttctcatcttcgggaaacaaggctcaaataaaactaatgtggacattgaaaaggtcatgattacagacgaagaggaaatcaggaccaccaatcccgtggctacggagcagtacggtgctgtatctaccaaccttcaaagcggcaacacacaagcagctacctcagatgtcaacacacaaggcgttcttcctggcatggtctggcaggacagagacgtgtacctgcaggggcccatctgggcaaagattccccacacggatggacactttcacccttctcctcttatgggaggatttggattgaagcaccctcccccacagattctcatcaagaataccccggtacctgcgaatccttctaccaccttcagtgcggcaaagtttgcttctttcatcacacagtactccacagggcaggtcagcgtggagatcgagtgggagctgcagaaagagaacagcaaacgctggaaccccgagattcagtatacctccaactacaacaagtctgttaatgtggactttactgtggacactaatggcgtgtattcagagcctcgccccattggcacaagatacctgactcgtaatctgtaa

SEQ ID NO: 12584 - DNA, 2208 bp, Artificial Sequence
  source: /note="Description of Artificial Sequence: Synthetic polynucleotide"
atggctgccgatggttatcttccagattggctcgaggacactctctctgaaggaataagacagtggtggaagctcaaacctggcccaccaccgccaaagcccgcagagcggcataaggacgacagcaggggtcttgtgcttcctgggtacaagtacctcggacccttcaacggactcgacaaaggagagccggtcaacgaggcagacgccgcggccctcgagcacgacaaggcctacgaccggcagctcgacagcggagacaacccgtacctcaagtacaaccacgccgacgcggagtttcaggagcgccttaaagaagatacgtcttttgggggcaacctcggacgagcagtcttccaggcgaaaaagagggttcttgaacctctgggcctggttgaggaacctgttaagacggctccgggaaaaaagaggccggtagagcactctcctgcggagccagactcctcctcgggaaccggaaaggcgggccagcagcctgcgagaaagagattgaatttcggtcagactggagacgcagactccgtacctgacccccagcctctcggacagccaccagcagccccctctggtctgggaactaatacgatggctacaggcagtggcgcaccaatggcagacaataacgagggcgccgacggagtgggtaattcctcgggaaattggcattgcgattccacatggatgggcgacagagtcatcaccaccagcacccgcacctgggctctgcccacctacaacaaccatctgtacaagcaaatttccagccaatcaggagcatcgaacgacaaccactactttggctacagcaccccctgggggtattttgacttcaacagattccactgccacttttcgccacgtgactggcaaagactcatcaacaacaactggggattccggcccaagagactcagcttcaagctctttaacattcaagtcaaggaggtcacgcagaatgacggtacgacgacgattgccaataaccttaccagcacggttcaggtctttactgactcggagtaccagctcccgtacgccctcggctcggcgcatcaaggatgcctcccgccgtttccagcggacgtcttcatggtcccacagtatggatacctcaccctgaacaacgggagtcaggcggtaggacgctcttccttttactgcctggagtactttccttctcagatgcttcgtactggaaacaactttaccttcagctacacctttgaagacgttcctttccacagcagctacgctcacagccaaagtctggaccgtctcatgaatcctctcatcgaccagtacctgtattacttgagcaaaacaaacgctccaagcggaaccaccacgatgtccaggcttcagttttctcaggccggagcaagtgacattcgggaccagtctagaaactggcttcctggaccctgttaccgccagcagcgagtatcaaagacagctgcggacaacaacaacagtgattactcgtggactggagctaccaagtaccaccccaatggaagagactctctggtgaacccgggcccagctatggccagccacaaggacgatgaagaaaaatattttcctcagagcggggttctcatcttcgggaaacaaggctcaaataaaactaatgtggacattgaaaaggtcatgattacagacgaagaggaaatcaggaccaccaatcccgtggctacggagcagtacggtgctgtatctaccaaccttcaaagcggcaacacacaagcagctacctcagatgtcaacacacaaggcgttcttcctggcatggtctggcaggacagagacgtgtacctgcaggggcccatctgggcaaagattccccacacggatggacactctcacccttctcctcttatgggaggatttggattgaagcaccctcccccacagattctcatcaagaataccccggtacctgcgaatccttctaccaccttcagtgcggcaaagtttgcttctttcatcacacagtactccacagggcaggtcagcgtggagatcgagtgggagctgcagaaagagaacagcaaacgctggaaccccgagattcagtatacctccaactacaacaagtctgttaatgtggactttactgtggacactaatggcgtgtattcagagcctcgccccattggcacaagatacctgactcgtaatctgtaa

SEQ ID NO: 12585 - DNA, 2205 bp, Artificial Sequence
  source: /note="Description of Artificial Sequence: Synthetic polynucleotide"
atggctgccgatggttatcttccagattggctcgaggacactctctctgaaggaataagacagtggtggaagctcaaacctggcccaccaccgccaaagcccgcagagcggcataaggacgacagcaggggtcttgtgcttcctgggtacaagtacctcggacccttcaacggactcgacaaaggagagccggtcaacgaggcagacgccgcggccctcgagcacgacaaggcctacgaccggcagctcgacagcggagacaacccgtacctcaagtacaaccacgccgacgcggagtttcaggagcgccttaaagaagatacgtcttttgggggcaacctcggacgagcagtcttccaggcgaaaaagagggttcttgaacctctgggcctggttgaggaacctgttaagacggctccgggaaaaaagaggccggtagagcactctcctgcggagccagactcctcctcgggaaccggaaaggcgggccagcagcctgcgagaaagagattgaatttcggtcagactggagacgcagactccgtacctgacccccagcctctcggacagccaccagcagccccctctggtctgggaactaatacgatggctacaggcagtggcgcaccaatggcagacaataacgagggcgccgacggagtgggtaattcctcgggaaattggcattgcgattccacatggatgggcgacagagtcatcaccaccagcacccgcacctgggctctgcccacctacaacaaccatctgtacaagcaaatttccagccaatcaggagcatcgaacgacaaccactactttggctacagcaccccctgggggtattttgacttcaacagattccactgccacttttcgccacgtgactggcaaagactcatcaacaacaactggggattccggcccaagagactcagcttcaagctctttaacattcaagtcaaggaggtcacgcagaatgacggtacgacgacgattgccaataaccttaccagcacggttcaggtctttactgactcggagtaccagctcccgtacgtcctcggctcggcgcatcaaggatgcctcccgccgtttccagcggacgtcttcatggtcccacagtatggatacctcaccctgaacaacgggagtcaggcggtaggacgctcttccttttactgcctggagtactttccttctcagatgcttcgtactggaaacaactttaccttcagctacacctttgaagacgttcctttccacagcagctacgctcacagccaaagtctggaccgtctcatgaatcctctcatcgaccagtacctgtattacttgagcaaaacaaacgctccaagcggaaccaccacgatgtccaggcttcagttttctcaggccggagcaagtgacattcgggaccagtctagaaactggcttcctggaccctgttaccgccagcagcgagtatcaaagacagctgcggacaacaacagtgattactcgtggactggagctaccaagtaccacctcaatggaagagactctctggtgaacccgggcccagctatggccagccacaaggacgatgaagaaaaatattttcctcagagcggggttctcatcttcgggaaacaaggctcaaataaaactaatgtggacattgaaaaggtcatgattacagacgaagaggaaatcaggaccaccaatcccgtggctacggagcagtacggtgctgtatctaccaaccttcaaagcggcaacacacaagcagctacctcagatgtcaacacacaaggcgttcttcctggcatggtctggcaggacagagacgtgtacctgcaggggcccatctgggcaaagattccccacacggatggacactttcacccttctcctcttatgggaggatttggattgaagcaccctcccccacagattctcatcaagaataccccggtacctgcgaatccttctaccaccttcagtgcggcaaagtttgcttctttcatcacacagtactccacagggcaggtcagcgtggagatcgagtgggagctgcagaaagagaacagcaaacgctggaaccccgagattcagtatacctccaactacaacaagtctgttaatgtggactttactgtggacactaatggcgtgtattcagagcctcgccccattggcacaagatacctgactcgtaatctgtaa

SEQ ID NO: 12586 - DNA, 2208 bp, Artificial Sequence
  source: /note="Description of Artificial Sequence: Synthetic polynucleotide"
atggctgccgatggttatcttccagattggctcgaggacactctctctgaaggaataagacagtggtggaagctcaaacctggcccaccaccgccaaagcccgcagagcggcataaggacgacagcaggggtcttgtgcttcctgggtacaagtacctcggacccttcaacggactcgacaaaggagagccggtcaacgaggcagacgccgcggccctcgagcacgacaaggcctacgaccggcagctcgacagcggagacaacccgtacctcaagtacaaccacgccgacgcggagtttcaggagcgccttaaagaagatacgtcttttgggggcaacctcgcaagagcagtattccaggcgaaaaagagggttcttgaacctctgggcctggttgaggagcctgttaagacggctccgggaaaaaagaggccggtagagcactctcctgcggagccagattcctcctccggaactggaaagtcgggccaacagcctgcaagaaagagattgaattttggtcagactggagacgcagactccgtacctgacccccagcctctcggacagccaccagcagccccctctggtctgggaactaatacgatggcttcaggcagtggcgcaccaatggcagacaataacgagggcgccgacggagtgggtaattcctcgggaaattggcattgcgattccacatggatgggcgacagagtcatcaccaccagcacccgcacctgggctctgcccacctacaacaaccatctgtacaagcaaatttccagccagtctggagccagcaacgacaaccactactttggctacagcaccccttgggggtattttgacttcaacagattccactgccacttctccccacgtgactggcaaagactcatcaacaacaattggggattccggcccaaaagactcaacttcaagctctttaacattcaagtcaaggaggtcacgcagaatgacggtacgacgacgattgccaataaccttaccagcacggttcaggtgtttactgactcggagtaccagctcccgtacgtcctcggctcggcgcatcaaggatgcctcccgccgttcccagcagacgtcttcatggtgccacagtatggatacctcaccctgaacaacgggagtcaggcggtaggacgctcttcattttactgcctggagtactttccttctcagatgctgcgtaccggaaacaactttaccttcagctacacctttgaggacgttccttttcacagcagctacgctcacagccagagtttggaccgtctcatgaatcctctcatcgaccagtacctgtattacttgagcagaacaaacactccaagcggaaccactacgcagtccaggcttcagttttctcaagccggagcgagtgacattcgggaccagtctaggaactggcttcctggaccctgttaccgccagcagcgagtatcaaagacagctgcggacaacaacaacagtgattactcgtggactggagctaccaagtatcacctcaatggaagagactctctggtgaatccgggcacagccatggccagccacaaggacgatgaagaaaagtattttcctcagagcggggttctcatcttcggaaaacaagactcgggaaaaactaatgtggacattgaaaaggtcatgattacagacgaagaggaaatcaggaccaccaatcccgtggctacggagcagtatggttctgtatctaccaatctccagagcggcaacacacaagcagctacctcagatgtcaacacacaaggcgttcttccaggcatggtctggcaggacagagacgtgtacctgcagggacccatctgggcaaagattccacacacggacggacattttcacccttctcctcttatgggaggatttggactgaagcaccctcccccgcagattctcatcaagaataccccggtacctgcgaatccttctaccaccttcagcgcggcaaagtttgcttccttcatcacacagtactccacggggcaggtcagcgtggagatcgagtgggagctgcagaaagagaacagcaaacgctggaaccccgagatccagtatacctccaactacaacaagtctgttaatgtggactttactgtggacactaatggcgtgtattcagagcctcgccccattggcacaagatacctgactcgtaatctgtaa

SEQ ID NO: 12587 - DNA, 2208 bp, Artificial Sequence
  source: /note="Description of Artificial Sequence: Synthetic polynucleotide"
atggctgccgatggttatcttccagattggctcgaggacactctctctgaaggaataagacagtggtggaagctcaaacctggcccaccaccgccaaagcccgcagagcggcataaggacgacagcaggggtcttgtgcttcctgggtacaagtacctcggacccttcaacggactcgacaaaggagagccggtcaacgaggcagacgccgcggccctcgagcacgacaaggcctacgaccggcagctcgacagcggagacaacccgtacctcaagtacaaccacgccgacgcggagtttcaggagcgccttaaagaagatacgtcttttgggggcaacctcgcaagagcagtattccaggcgaaaaagagggttcttgaacctctgggcctggttgaggagcctgttaagacggctccgggaaaaaagaggccggtagagcactctcctgcggagccagattcctcctccggaactggaaagtcgggccaacagcctgcaagaaagagattgaattttggtcagactggagacgcagactccgtacctgacccccagcctctcggacagccaccagcagccccctctggtctgggaactaatacgatggcttcaggcagtggcgcaccaatggcagacaataacgagggcgccgacggagtgggtaattcctcgggaaattggcattgcgattccacatggatgggcgacagagtcatcaccaccagcacccgcacctgggctctgcccacctacaacaaccatctgtacaagcaaatttccagccagtctggagccagcaacgacaaccactactttggctacagcaccccttgggggtattttgacttcaacagattccactgccacttctccccacgtgactggcaaagactcatcaacaacaattggggattccggcccaaaagactcaacttcaagctctttaacattcaagtcaaggaggtcacgcagaatgacggtacgacgacgattgccaataaccttaccagcacggttcaggtgtttactgactcggagtaccagctcccgtacgtcctcggctcggcgcatcaaggatgcctcccgccgttcccagcagacgtcttcatggtgccacagtatggatacctcaccctgaacaacgggagtcaggcggtaggacgctcttcattttactgcctggagtactttccttctcagatgctgcgtaccggaaacaactttaccttcagctacacctttgaggacgttccttttcacagcagctacgctcacagccagagtttggaccgtctcatgaatcctctcatcgaccagtacctgtattacttgagcagaacaaacactccaagcggaaccactacgcagtccaggcttcagttttctcaagccggagcgagtgacattcgggaccagtctaggaactggcttcctggaccctgttaccgccagcagcgagtatcaaagacagctgcggacaacaacaacagtgattactcgtggactggagctaccaagtatcacctcaatggaagagactctctggtgaatccgggcacagccatggccagccacaaggacgatgaagaaaagtattttcctcagagcggggttctcatcttccggaaacaagactcgggaaaaactaatgtggacattgaaaaggtcatgattacagacgaagaggaaatcaggaccaccaatcccgtggctacggagcagtatggttctgtatctaccaatctccagagcggcaacacacaagcagctacctcagatgtcaacacacaaggcgttcttccaggcatggtctggcaggacagagacgtgtacctgcagggacccatctgggcaaagattccacacacggacggacattttcacccttctcctcttatgggaggattgggacagaagcaccctcccccgcagagtctcatcaagaataccccggtacctgcgaatccttctaccaccttcagcgcggcaaagtttgcttccttcatcacacagtactccacggggcaggtcagcgtggagatcgagtgggagctgcagaaagagaacagcaaacgctggaaccccgagatccagtatacctccaactacaacaagtctgttaatgtggactttactgtggacactaatggcgtgtattcagagcctcgccccattggcacaagatacctgactcgtaatctgtaa

SEQ ID NO: 12588 - DNA, 2208 bp, Artificial Sequence
  source: /note="Description of Artificial Sequence: Synthetic polynucleotide"
atggctgccgatggttatcttccagattggctcgaggacactctctctgaaggaataagacagtggtggaagctcaaacctggcccaccaccgccaaagcccgcagagcggcataaggacgacagcaggggtcttgtgcttcctgggtacaagtacctcggacccttcaacggactcgacaaaggagagccggtcaacgaggcagacgccgcggccctcgagcacgacaaggcctacgaccggcagctcgacagcggagacaacccgtacctcaagtacaaccacgccgacgcggagtttcaggagcgccttaaagaagatacgtcttttgggggcaacctcgcaagagcagtattccaggcgaaaaagagggttcttgaacctctgggcctggttgaggagcctgttaagacggctccgggaaaaaagaggccggtagagcactctcctgcggagccagattcctcctccggaactggaaagtcgggccaacagcctgcaagaaagagattgaattttggtcagactggagacgcagactccgtacctgacccccagcctctcggacagccaccagcagccccctctggtctgggaactaatacgatggcttcaggcagtggcgcaccaatggcagacaataacgagggcgccgacggagtgggtaattcctcgggaaattggcattgcgattccacatggatgggcgacagagtcatcaccaccagcacccgcacctgggctctgcccacctacaacaaccatctgtacaagcaaatttccagccagtctggagccagcaacgacaaccactactttggctacagcaccccttgggggtattttgacttcaacagattccactgccacttctccccacgtgactggcaaagactcatcaacaacaattggggattccggcccaaaagactcaacttcaagctctttaacattcaagtcaaggaggtcacgcagaatgacggtacgacgacgattgccaataaccttaccagcacggttcaggtgtttactgactcggagtaccagctcccgtacgtcctcggctcggcgcatcaaggatgcctcccgccgttcccagcagacgtcttcatggtgccacagtatggatacctcaccctgaacaacgggagtcaggcggtaggacgctcttcattttactgcctggagtactttccttctcagatgctgcgtaccggaaacaactttaccttcagctacacctttgaggacgttccttttcacagcagctacgctcacagccagagtttggaccgtctcatgaatcctctcatcgaccagtacctgtattacttgagcagaacaaacactccaagcggaaccactacgcagtccaggcttcagttttctcaagccggagcgagtgacattcgggaccagtctaggaactggcttcctggaccctgttaccgccagcagcgagtatcaaagacagctgcggacaacaacaacagtgattactcgtggactggagctaccaagtatcacctcaatggaagagactctctggtgaatccgggcacagccatggccagccacaaggacgatgaagaaaagtattttcctcagagcggggttctcatcttcggaaaacaagactcgggaaaaactaatgtggacattgaaaaggtcatgattacagacgaagaggaaatcaggaccaccaatcccgtggctacggagcagtatggttctgtatctaccaatctccagagcggcaacacacaagcagctacctcagatgtcaacacacaaggcgttcttccaggcatggtctggcaggacagagacgtgtacctgcagggacccatctgggcaaagattccacacacggacggacattttcacccttctcctcttatgggaggattgggacagaagcaccctcccccgcagattctcatcaagaataccccggtacctgcgaatccttctaccaccttcagcgcggcaaagtttgcttccttcatcacacagtactccacggggcaggtcagcgtggagatcgagtgggagctgcagaaagagaacagcaaacgctggaaccccgagatccagtatacctccaactacaacaagtctgttaatgtggactttactgtggacactaatggcgtgtattcagagcctcgccccattggcacaagatacctgactcgtaatctgtaa

SEQ ID NO: 12589 - DNA, 2208 bp, Artificial Sequence
  source: /note="Description of Artificial Sequence: Synthetic polynucleotide"
atggctgccgatggttatcttccagattggctcgaggacactctctctgaaggaataagacagtggtggaagctcaaacctggcccaccaccgccaaagcccgcagagcggcataaggacgacagcaggggtcttgtgcttcctgggtacaagtacctcggacccttcaacggactcgacaaaggagagccggtcaacgaggcagacgccgcggccctcgagcacgacaaggcctacgaccggcagctcgacagcggagacaacccgtacctcaagtacaaccacgccgacgcggagtttcaggagcgccttaaagaagatacgtcttttgggggcaacctcgcaagagcagtattccaggcgaaaaagagggttcttgaacctctgggcctggttgaggagcctgttaagacggctccgggaaaaaagaggccggtagagcactctcctgcggagccagattcctcctccggaactggaaagtcgggccaacagcctgcaagaaagagattgaattttggtcagactggagacgcagactccgtacctgacccccagcctctcggacagccaccagcagccccctctggtctgggaactaatacgatggcttcaggcagtggcgcaccaatggcagacaataacgagggcgccgacggagtgggtaattcctcgggaaattggcattgcgattccacatggatgggcgacagagtcatcaccaccagcacccgcacctgggctctgcccacctacaacaaccatctgtacaagcaaatttccagccagtctggagccagcaacgacaaccactactttggctacagcaccccttgggggtattttgacttcaacagattccactgccacttctccccacgtgactggcaaagactcatcaacaacaattggggattccggcccaaaagactcaacttcaagctctttaacattcaagtcaaggaggtcacgcagaatgacggtacgacgacgattgccaataaccttaccagcacggttcaggtgtttactgactcggagtaccagctcccgtacgtcctcggctcggcgcatcaaggatgcctcccgccgttcccagcagacgtcttcatggtgccacggtatggatacctcaccctgaacaacgggagtcaggcggtaggacgctcttcattttactgcctggagtactttccttctcagatgctgcgtaccggaaacaactttaccttcagctacacctttgaggacgttccttttcacagcagctacgctcacagccagagtttggaccgtctcatgaatcctctcatcgaccagtacctgtattacttgagcagaacaaacactccaagcggaaccactacgcagtccaggcttcagttttctcaagccggagcgagtgacattcgggaccagtctaggaactggcttcctggaccctgttaccgccagcagcgagtatcaaagacagctgcggacaacaacaacagtgattactcgtggactggagctaccaagtatcacctcaatggaagagactctctggtgaatccgggcacagccatggccagccacaaggacgatgaagaaaagtattttcctcagagcggggttctcatcttccggaaacaagactcgggaaaaactaatgtggacattgaaaaggtcatgattacagacgaagaggaaatcaggaccaccaatcccgtggctacggagcagtatggttctgtatctaccaatctccagagcggcaacacacaagcagctacctcagatgtcaacacacaaggcgttcttccaggcatggtctggcaggacagagacgtgtacctgcagggacccatctgggcaaagattccacacacggacggacattttcacccttctcctcttatgggaggatttggactgaagcaccctcccccgcagattctcatcaagaataccccggtacctgcgaatccttctaccaccttcagcgcggcaaagtttgcttccttcatcacacagtactccacggggcaggtcagcgtggagatcgagtgggagctgcagaaagagaacagcaaacgctggaaccccgagatccagtatacctccaactacaacaagtctgttaatgtggactttactgtggacactaatggcgtgtattcagagcctcgccccattggcacaagatacctgactcgtaatctgtaa

SEQ ID NO: 12590 - DNA, 2208 bp, Artificial Sequence
  source: /note="Description of Artificial Sequence: Synthetic polynucleotide"
atggctgccgatggttatcttccagattggctcgaggacactctctctgaaggaataagacagtggtggaagctcaaacctggcccaccaccgccaaagcccgcagagcggcataaggacgacagcaggggtcttgtgcttcctgggtacaagtacctcggacccttcaacggactcgacaaaggagagccggtcaacgaggcagacgccgcggccctcgagcacgacaaggcctacgaccggcagctcgacagcggagacaacccgtacctcaagtacaaccacgccgacgcggagtttcaggagcgccttaaagaagatacgtcttttgggggcaacctcgcaagagcagtattccaggcgaaaaagagggttcttgaacctctgggcctggttgaggagcctgttaagacggctccgggaaaaaagaggccggtagagcactctcctgcggagccagattcctcctccggaactggaaagtcgggccaacagcctgcaagaaagagattgaattttggtcagactggagacgcagactccgtacctgacccccagcctctcggacagccaccagcagccccctctggtctgggaactaatacgatggcttcaggcagtggcgcaccaatggcagacaataacgagggcgccgacggagtgggtaattcctcgggaaattggcattgcgattccacatggatgggcgacagagtcatcaccaccagcacccgcacctgggctctgcccacctacaacaaccatctgtacaagcaaatttccagccagtctggagccagcaacgacaaccactactttggctacagcaccccttgggggtattttgacttcaacagattccactgccacttctccccacgtgactggcaaagactcatcaacaacaattggggattccggcccaaaagactcaacttcaagctctttaacattcaagtcaaggaggtcacgcagaatgacggtacgacgacgattgccaataaccttaccagcacggttcaggtgtttactgactcggagtaccagctcccgtacgtcctcggctcggcgcatcaaggatgcctcccgccgttcccagcagacgtcttcatggtgccacagtatggatacctcaccctgaacaacgggagtcaggcggtaggacgctcttcattttactgcctggagtactttccttctcagatgctgcgtaccggaaacaactttaccttcagctacacctttgaggacgttccttttcacagcagctacgctcacagccagagtttggaccgtctcatgaatcctctcatcgaccagtacctgtattacttgagcagaacaaacactccaagcggaaccactacgcagtccaggcttcagttttctcaagccggagcgagtgacattcgggaccagtctaggaactggcttcctggaccctgttaccgccagcagcgagtatcaaagacagctgcggacaacaacaacagtgattactcgtggactggagctaccaagtatcacctcaatggaagagactctctggtgaatccgggcacagccatggccagccacaaggacgatgaagaaaagtattttcctcagagcggggttctcatcttccggaaacaagactcgggaaaaactaatgtggacattgaaaaggtcatgattacagacgaagaggaaatcaggaccaccaatcccgtggctacggagcagtatggttctgtatctaccaatctccagagcggcaacacacaagcagctacctcagatgtcaacacacaaggcgttcttccaggcatggtctggcaggacagagacgtgtacctgcagggacccatctgggcaaagattccacacacggacggacattttcacccttctcctcttatgggaggatttggactgaagcaccctcccccgcagattctcatcaagaataccccggtacctgcgaatccttctaccaccttcagcgcggcaaagtttgcttccttcatcacacagtactccacggggcaggtcagcgtggagatcgagtgggagctgcagaaagagaacagcaaacgctggaaccccgagatccagtatacctccaactacaacaagtctgttaatgtggactttactgtggacactaatggcgtgtattcagagcctcgccccattggcacaagatacctgactcgtaatctgtaa

SEQ ID NO: 12591 - DNA, 2208 bp, Artificial Sequence
  source: /note="Description of Artificial Sequence: Synthetic polynucleotide"
atggctgccgatggttatcttccagattggctcgaggacactctctctgaaggaataagacagtggtggaagctcaaacctggcccaccaccgccaaagcccgcagagcggcataaggacgacagcaggggtcttgtgcttcctgggtacaagtacctcggacccttcaacggactcgacaaaggagagccggtcaacgaggcagacgccgcggccctcgagcacgacaaggcctacgaccggcagctcgacagcggagacaacccgtacctcaagtacaaccacgccgacgcggagtttcaggagcgccttaaagaagatacgtcttttgggggcaacctcgcaagagcagtattccaggcgaaaaagagggttcttgaacctctgggcctggttgaggagcctgttaagacggctccgggaaaaaagaggccggtagagcactctcctgcggagccagattcctcctccggaactggaaagtcgggccaacagcctgcaagaaagagattgaattttggtcagactggagacgcagactccgtacctgacccccagcctctcggacagccaccagcagccccctctggtctgggaactaatacgatggcttcaggcagtggcgcaccaatggcagacaataacgagggcgccgacggagtgggtaattcctcgggaaattggcattgcgattccacatggatgggcgacagagtcatcaccaccagcacccgcacctgggctctgcccacctacaacaaccatctgtacaagcaaatttccagccagtctggagccagcaacgacaaccactactttggctacagcaccccttgggggtattttgacttcaacagattccactgccacttctccccacgtgactggcaaagactcatcaacaacaattggggattccggcccaaaagactcaacttcaagctctttaacattcaagtcaaggaggtcacgcagaatgacggtacgacgacgattgccaataaccttaccagcacggttcaggtgtttactgactcggagtaccagctcccgtacgtcctcggctcggcgcatcaaggatgcctcccgccgttcccagcagacgtcttcatggtgccacggtatggatacctcaccctgaacaacgggagtcaggcggtaggacgctcttcattttactgcctggagtactttccttctcagatgctgcgtaccggaaacaactttaccttcagctacacctttgaggacgttccttttcacagcagctacgctcacagccagagtttggaccgtctcatgaatcctctcatcgaccagtacctgtattacttgagcagaacaaacactccaagcggaaccactacgcagtccaggcttcagttttctcaagccggagcgagtgacattcgggaccagtctaggaactggcttcctggaccctgttaccgccagcagcgagtatcaaagacagctgcggacaacaacaacagtgattactcgtggactggagctaccaagtatcacctcaatggaagagactctctggtgaatccgggcacagccatggccagccacaaggacgatgaagaaaagtattttcctcagagcggggttctcatcttcggaaaacaagactcgggaaaaactaatgtggacattgaaaaggtcatgattacagacgaagaggaaatcaggaccaccaatcccgtggctacggagcagtatggttctgtatctaccaatctccagagcggcaacacacaagcagctacctcagatgtcaacacacaaggcgttcttccaggcatggtctggcaggacagagacgtgtacctgcagggacccatctgggcaaagattccacacacggacggacattttcacccttctcctcttatgggaggatttggactgaagcaccctcccccgcagattctcatcaagaataccccggtacctgcgaatccttctaccaccttcagcgcggcaaagtttgcttccttcatcacacagtactccacggggcaggtcagcgtggagatcgagtgggagctgcagaaagagaacagcaaacgctggaaccccgagatccagtatacctccaactacaacaagtctgttaatgtggactttactgtggacactaatggcgtgtattcagagcctcgccccattggcacaagatacctgactcgtaatctgtaa

SEQ ID NO: 12592 - DNA, 2208 bp, Artificial Sequence
  source: /note="Description of Artificial Sequence: Synthetic polynucleotide"
atggctgccgatggttatcttccagattggctcgaggacactctctctgaaggaataagacagtggtggaagctcaaacctggcccaccaccgccaaagcccgcagagcggcataaggacgacagcaggggtcttgtgcttcctgggtacaagtacctcggacccttcaacggactcgacaaaggagagccggtcaacgaggcagacgccgcggccctcgagcacgacaaggcctacgaccggcagctcgacagcggagacaacccgtacctcaagtacaaccacgccgacgcggagtttcaggagcgccttaaagaagatacgtcttttgggggcaacctcgcaagagcagtattccaggcgaaaaagagggttcttgaacctctgggcctggttgaggagcctgttaagacggctccgggaaaaaagaggccggtagagcactctcctgcggagccagattcctcctccggaactggaaagtcgggccaacagcctgcaagaaagagattgaattttggtcagactggagacgcagactccgtacctgacccccagcctctcggacagccaccagcagccccctctggtctgggaactaatacgatggcttcaggcagtggcgcaccaatggcagacaataacgagggcgccgacggagtgggtaattcctcgggaaattggcattgcgattccacatggatgggcgacagagtcatcaccaccagcacccgcacctgggctctgcccacctacaacaaccatctgtacaagcaaatttccagccagtctggagccagcaacgacaaccactactttggctacagcaccccttgggggtattttgacttcaacagattccactgccacttctccccacgtgactggcaaagactcatcaacaacaattggggattccggcccaaaagactcaacttcaagctctttaacattcaagtcaaggaggtcacgcagaatgacggtacgacgacgattgccaataaccttaccagcacggttcaggtgtttactgactcggagtaccagctcccgtacgtcctcggctcggcgcatcaaggatgcctcccgccgttcccagcagacgtcttcatggtgccacagtatggatacctcaccctgaacaacgggagtcaggcggtaggacgctcttcattttactgcctggagtactttccttctcagatgctgcgtaccggaaacaactttaccttcagctacacctttgaggacgttccttttcacagcagctacgctcacagccagagtttggaccgtctcatgaatcctctcatcgaccagtacctgtattacttgagcagaacaaacactccaagcggaaccactacgcagtccaggcttcagttttctcaagccggagcgagtgacattcgggaccagtctaggaactggcttcctggaccctgttaccgccagcagcgagtatcaaagacagctgcggacaacaacaacagtgattactcgtggactggagctaccaagtatcacctcaatggaagagactctctggtgaatccgggcacagccatggccagccacaaggacgatgaagaaaagtattttcctcagagcggggttctcatcttcggaaaacaagactcgggaaaaactaatgtggacattgaaaaggtcatgattacagacgaagaggaaatcaggaccaccaatcccgtggctacggagcagtatggttctgtatctaccaatctccagagcggcaacacacaagcagctacctcagatgtcaacacacaaggcgttcttccaggcatggtctggcaggacagagacgtgtacctgcagggacccatctgggcaaagattccacacacggacggacattttcacccttctcctcttatgggaggattgggacagaagcaccctcccccgcagagtctcatcaagaataccccggtacctgcgaatccttctaccaccttcagcgcggcaaagtttgcttccttcatcacacagtactccacggggcaggtcagcgtggagatcgagtgggagctgcagaaagagaacagcaaacgctggaaccccgagatccagtatacctccaactacaacaagtctgttaatgtggactttactgtggacactaatggcgtgtattcagagcctcgccccattggcacaagatacctgactcgtaatctgtaa

SEQ ID NO: 12593 - DNA, 2208 bp, Artificial Sequence
  source: /note="Description of Artificial Sequence: Synthetic polynucleotide"
atggctgccgatggttatcttccagattggctcgaggacactctctctgaaggaataagacagtggtggaagctcaaacctggcccaccaccgccaaagcccgcagagcggcataaggacgacagcaggggtcttgtgcttcctgggtacaagtacctcggacccttcaacggactcgacaaaggagagccggtcaacgaggcagacgccgcggccctcgagcacgacaaggcctacgaccggcagctcgacagcggagacaacccgtacctcaagtacaaccacgccgacgcggagtttcaggagcgccttaaagaagatacgtcttttgggggcaacctcgcaagagcagtattccaggcgaaaaagagggttcttgaacctctgggcctggttgaggagcctgttaagacggctccgggaaaaaagaggccggtagagcactctcctgcggagccagattcctcctccggaactggaaagtcgggccaacagcctgcaagaaagagattgaattttggtcagactggagacgcagactccgtacctgacccccagcctctcggacagccaccagcagccccctctggtctgggaactaatacgatggcttcaggcagtggcgcaccaatggcagacaataacgagggcgccgacggagtgggtaattcctcgggaaattggcattgcgattccacatggatgggcgacagagtcatcaccaccagcacccgcacctgggctctgcccacctacaacaaccatctgtacaagcaaatttccagccagtctggagccagcaacgacaaccactactttggctacagcaccccttgggggtattttgacttcaacagattccactgccacttctccccacgtgactggcaaagactcatcaacaacaattggggattccggcccaaaagactcaacttcaagctctttaacattcaagtcaaggaggtcacgcagaatgacggtacgacgacgattgccaataaccttaccagcacggttcaggtgtttactgactcggagtaccagctcccgtacgtcctcggctcggcgcatcaaggatgcctcccgccgttcccagcagacgtcttcatggtgccacagtatggatacctcaccctgaacaacgggagtcaggcggtaggacgctcttcattttactgcctggagtactttccttctcagatgctgcgtaccggaaacaactttaccttcagctacacctttgaggacgttccttttcacagcagctacgctcacagccagagtttggaccgtctcatgaatcctctcatcgaccagtacctgtattacttgagcagaacaaacactccaagcggaaccactacgcagtccaggcttcagttttctcaagccggagcgagtgacattcgggaccagtctaggaactggcttcctggaccctgttaccgccagcagcgagtatcaaagacagctgcggacaacaacaacagtgattactcgtggactggagctaccaagtatcacctcaatggaagagactctctggtgaatccgggcacagccatggccagccacaaggacgatgaagaaaagtattttcctcagagcggggttctcatcttcggaaaacaagactcggagaaaactaatgtggacattgaaaaggtcatgattacagacgaagaggaaatcaggaccaccaatcccgtggctacggagcagtatggttctgtatctaccaatctccagagcggcaacacacaagcagctacctcagatgtcaacacacaaggcgttcttccaggcatggtctggcaggacagagacgtgtacctgcagggacccatctgggcaaagattccacacacggacggacattttcacccttctcctcttatgggaggatttggactgaagcaccctcccccgcagattctcatcaagaataccccggtacctgcgaatccttctaccaccttcagcgcggcaaagtttgcttccttcatcacacagtactccacggggcaggtcagcgtggagatcgagtgggagctgcagaaagagaacagcaaacgctggaaccccgagatccagtatacctccaactacaacaagtctgttaatgtggactttactgtggacactaatggcgtgtattcagagcctcgccccattggcacaagatacctgactcgtaatctgtaa

SEQ ID NO: 12594 - DNA, 2208 bp, Artificial Sequence
  source: /note="Description of Artificial Sequence: Synthetic polynucleotide"
atggctgccgatggttatcttccagattggctcgaggacactctctctgaaggaataagacagtggtggaagctcaaacctggcccaccaccgccaaagcccgcagagcggcataaggacgacagcaggggtcttgtgcttcctgggtacaagtacctcggacccttcaacggactcgacaaaggagagccggtcaacgaggcagacgccgcggccctcgagcacgacaaggcctacgaccggcagctcgacagcggagacaacccgtacctcaagtacaaccacgccgacgcggagtttcaggagcgccttaaagaagatacgtcttttgggggcaacctcgcaagagcagtattccaggcgaaaaagagggttcttgaacctctgggcctggttgaggagcctgttaagacggctccgggaaaaaagaggccggtagagcactctcctgcggagccagattcctcctccggaactggaaagtcgggccaacagcctgcaagaaagagattgaattttggtcagactggagacgcagactccgtacctgacccccagcctctcggacagccaccagcagccccctctggtctgggaactaatacgatggcttcaggcagtggcgcaccaatggcagacaataacgagggcgccgacggagtgggtaattcctcgggaaattggcattgcgattccacatggatgggcgacagagtcatcaccaccagcacccgcacctgggctctgcccacctacaacaaccatctgtacaagcaaatttccagccagtctggagccagcaacgacaaccactactttggctacagcaccccttgggggtattttgacttcaacagattccactgccacttctccccacgtgactggcaaagactcatcaacaacaattggggattccggcccaaaagactcaacttcaagctctttaacattcaagtcaaggaggtcacgcagaatgacggtacgacgacgattgccaataaccttaccagcacggttcaggtgtttactgactcggagtaccagctcccgtacgtcctcggctcggcgcatcaaggatgcctcccgccgttcccagcagacgtcttcatggtgccacagtatggatacctcaccctgaacaacgggagtcaggcggtaggacgctcttcattttactgcctggagtactttccttctcagatgctgcgtaccggaaacaactttaccttcagctacacctttgaggacgttccttttcacagcagctacgctcacagccagagtttggaccgtctcatgaatcctctcatcgaccagtacctgtattacttgagcagaacaaacactccaagcggaaccactacgcagtccaggcttcagttttctcaagccggagcgagtgacattcgggaccagtctaggaactggcttcctggaccctgttaccgccagcagcgagtatcaaagacagctgcggacaacaacaacagtgattactcgtggactggagctaccaagtatcacctcaatggaagagactctctggtgaatccgggcacagccatggccagccacaaggacgatgaagaaaagtattttcctcagagcggggttctcatcttcggaaaacaagactcgggaaaaactaatgtggacattgaaaaggtcatgattacagacgaagaggaaatcaggaccaccaatcccgtggctacggagcagtatggttctgtatctaccaatctccagagcggcaacacacaagcagctacctcagatgtcaacacacaaggcgttcttccaggcatggtctggcaggacagagacgtgtacctgcagggacccatctgggcaaagattccacacacggacggacattttcacccttctcctcttatgggaggatttggacagaagcaccctcccccgcagagtctcatcaagaataccccggtacctgcgaatccttctaccaccttcagcgcggcaaagtttgcttccttcatcacacagtactccacggggcaggtcagcgtggagatcgagtgggagctgcagaaagagaacagcaaacgctggaaccccgagatccagtatacctccaactacaacaagtctgttaatgtggactttactgtggacactaatggcgtgtattcagagcctcgccccattggcacaagatacctgactcgtaatctgtaa

SEQ ID NO: 12595 - DNA, 2208 bp, Artificial Sequence
  source: /note="Description of Artificial Sequence: Synthetic polynucleotide"
atggctgccgatggttatcttccagattggctcgaggacactctctctgaaggaataagacagtggtggaagctcaaacctggcccaccaccgccaaagcccgcagagcggcataaggacgacagcaggggtcttgtgcttcctgggtacaagtacctcggacccttcaacggactcgacaaaggagagccggtcaacgaggcagacgccgcggccctcgagcacgacaaggcctacgaccggcagctcgacagcggagacaacccgtacctcaagtacaaccacgccgacgcggagtttcaggagcgccttaaagaagatacgtcttttgggggcaacctcgcaagagcagtattccaggcgaaaaagagggttcttgaacctctgggcctggttgaggagcctgttaagacggctccgggaaaaaagaggccggtagagcactctcctgcggagccagattcctcctccggaactggaaagtcgggccaacagcctgcaagaaagagattgaattttggtcagactggagacgcagactccgtacctgacccccagcctctcggacagccaccagcagccccctctggtctgggaactaatacgatggcttcaggcagtggcgcaccaatggcagacaataacgagggcgccgacggagtgggtaattcctcgggaaattggcattgcgattccacatggatgggcgacagagtcatcaccaccagcacccgcacctgggctctgcccacctacaacaaccatctgtacaagcaaatttccagccagtctggagccagcaacgacaaccactactttggctacagcaccccttgggggtattttgacttcaacagattccactgccacttctccccacgtgactggcaaagactcatcaacaacaattggggattccggcccaaaagactcaacttcaagctctttaacattcaagtcaaggaggtcacgcagaatgacggtacgacgacgattgccaataaccttaccagcacggttcaggtgtttactgactcggagtaccagctcccgtacgtcctcggctcggcgcatcaaggatgcctcccgccgttcccagcagacgtcttcatggtgccacagtatggatacctcaccctgaacaacgggagtcaggcggtaggacgctcttcattttactgcctggagtactttccttctcagatgctgcgtaccggaaacaactttaccttcagccacacctttgaggacgttccttttcacagcagctacgctcacagccagagtttggaccgtctcatgaatcctctcatcgaccagtacctgtattacttgagcagaacaaacactccaagcggaaccactacgcagtccaggcttcagttttctcaagccggagcgagtgacattcgggaccagtctaggaactggcttcctggaccctgttaccgccagcagcgagtatcaaagacagctgcggacaacaacaacagtgattactcgtggactggagctaccaagtatcacctcaatggaagagactctctggtgaatccgggcacagccatggccagccacaaggacgatgaagaaaagtattttcctcagagcggggttctcatcttcggaaaacaagactcgggaaaaactaatgtggacattgaaaaggtcatgattacagacgaagaggaaatcaggaccaccaatcccgtggctacggagcagtatggttctgtatctaccaatctccagagcggcaacacacaagcagctacctcagatgtcaacacacaaggcgttcttccaggcatggtctggcaggacagagacgtgtacctgcagggacccatctgggcaaagattccacacacggacggacattttcacccttctcctcttatgggaggatttggactgaagcaccctcccccgcagattctcatcaagaataccccggtacctgcgaatccttctaccaccttcagcgcggcaaagtttgcttccttcatcacacagtactccacggggcaggtcagcgtggagatcgagtgggagctgcagaaagagaacagcaaacgctggaaccccgagatccagtatacctccaactacaacaagtctgttaatgtggactttactgtggacactaatggcgtgtattcagagcctcgccccattggcacaagatacctgactcgtaatctgtaa

SEQ ID NO: 12596 - DNA, 2208 bp, Artificial Sequence
  source: /note="Description of Artificial Sequence: Synthetic polynucleotide"
atggctgccgatggttatcttccagattggctcgaggacactctctctgaaggaataagacagtggtggaagctcaaacctggcccaccaccgccaaagcccgcagagcggcataaggacgacagcaggggtcttgtgcttcctgggtacaagtacctcggacccttcaacggactcgacaaaggagagccggtcaacgaggcagacgccgcggccctcgagcacgacaaggcctacgaccggcagctcgacagcggagacaacccgtacctcaagtacaaccacgccgacgcggagtttcaggagcgccttaaagaagatacgtcttttgggggcaacctcgcaagagcagtattccaggcgaaaaagagggttcttgaacctctgggcctggttgaggagcctgttaagacggctccgggaaaaaagaggccggtagagcactctcctgcggagccagattcctcctccggaactggaaagtcgggccaacagcctgcaggaaagagattgaattttggtcggactggagacgcagactccgtacctgacccccagcctctcggacagccaccagcagccccctctggtctgggaactaatacgatggcttcaggcagtggcgcaccaatggcagacaataacgagggcgccgacggagtgggtaattcctcgggaaattggcattgcgattccacatggatgggcgacagagtcatcaccaccagcacccgcacctgggctctgcccacctacaacaaccatctgtacaagcaaatttccagccagtctggagccagcaacgacaaccactactttggctacagcaccccttgggggtattttgacttcaacagattccactgccacttctccccacgtgactggcaaagactcatcaacaacaattggggattccggcccaaaagactcaacttcaagctctttaacattcaagtcaaggaggtcacgcagaatgacggtacgacgacgattgccaataaccttaccagcacggttcaggtgtttactgactcggagtaccagctcccgtacgtcctcggctcggcgcatcaaggatgcctcccgccgttcccagcagacgtcttcatggtgccacagtatggatacctcaccctgaacaacgggagtcaggcggtaggacgctcttcattttactgcctggagtactttccttctcagatgctgcgtaccggaaacaactttaccttcagctacacctttgaggacgttccttttcacagcagctacgctcacagccagagtttggaccgtctcatgaatcctctcatcgaccagtacctgtattacttgagcagaacaaacactccaagcggaaccactacgcagtccaggcttcagttttctccagccggagcgagtgacattcgggaccagtctaggaactggcttcctggaccctgttaccgccagcagcgagtatcaaagacagctgcggacaacaacaacagtgattactcgtggactggagctaccaagtatcacctcaatggaagagactctctggtgaatccgggcacagccatggccagccacaaggacgatgaagaaaagtattttcctcagagcggggttctcatcttcggaaaacaagactcgggaaaaactaatgtggacattgaaaaggtcatgattacagacgaagaggaaatcaggaccaccaatcccgtggctacggagcagtatggttctgtatctaccaatctccagagcggcaacacacaagcagctacctcagatgtcaacacacaaggcgttcttccaggcatggtctggcaggacagagacgtgtacctgcagggacccatctgggcaaagattccacacacggacggacattttcacccttctcctcttatgggaggatttggactgaagcaccctcccccgcagattctcatcaagaataccccggtacctgcgaatccttctaccaccttcagcgcggcaaagtttgcttccttcatcacacagtactccacggggcaggtcagcgtggagatcgagtgggagctgcagaaagagaacagcaaacgctggaaccccgagatccagtatacctccaactacaacaagtctgttaatgtggactttactgtggacactaatggcgtgtattcagagcctcgccccattggcacaagatacctgactcgtaatctgtaa

SEQ ID NO: 12597 - DNA, 2205 bp, Artificial Sequence
  source: /note="Description of Artificial Sequence: Synthetic polynucleotide"
atggctgccgatggttatcttccagattggctcgaggacactctctctgaaggaataagacagtggtggaagctcaaacctggcccaccaccgccaaagcccgcagagcggcataaggacgacagcaggggtcttgtgcttcctgggtacaagtacctcggacccttcaacggactcgacaaaggagagccggtcaacgaggcagacgccgcggccctcgagcacgacaaggcctacgaccggcagctcgacagcggagacaacccgtacctcaagtacaaccacgccgacgcggagtttcaggagcgccttaaagaagatacgtcttttgggggcaacctcgcaagagcagtattccaggcgaaaaagagggttcttgaacctctgggcctggttgaggagcctgttaagacggctccgggaaaaaagaggccggtagagcactctcctgcggagccagattcctcctccggaactggaaagtcgggccaacagcctgcaagaaagagattgaattttggtcagactggagacgcagactccgtacctgacccccagcctctcggacagccaccagcagccccctctggtctgggaactaatacgatggcttcaggcagtggcgcaccaatggcagacaataacgagggcgccgacggagtgggtaattcctcgggaaattggcattgcgattccacatggatgggcgacagagtcatcaccaccagcacccgcacctgggctctgcccacctacaacaaccatctgtacaagcaaatttccagccagtctggagccagcaacgacaaccactactttggctacagcaccccttgggggtattttgacttcaacagattccactgccacttctccccacgtgactggcaaagactcatcaacaacaattggggattccggcccaaaagactcaacttcaagctctttaacattcaagtcaaggaggtcacgcagaatgacggtacgacgacgattgccaataaccttaccagcacggttcaggtgtttactgactcggagtaccagctcccgtacgtcctcggctcggcgcatcaaggatgcctcccgccgttcccagcagacgtcttcatggtgccacagtatggatacctcaccctgaacaacgggagtcaggcggtaggacgctcttcattttactgcctggagtactttccttctcagatgctgcgtaccggaaacaactttaccttcagctacacctttgaggacgttccttttcacagcagctacgctcacagccagagtttggaccgtctcatgaatcctctcatcgaccagtacctgtattacttgagcagaacaaacactccaagcggaaccactacgcagtccaggcttcagttttctcaagccggagcgagtgacattcgggaccagtctaggaactggcttcctggaccctgttaccgccagcagcgagtatcaaagacagctgcggacaacaacagtgattactcgtggactggagctaccaagtatcacctcaatggaagagactctctggtgaatccgggcacagccatggccagccacaaggacgatgaagaaaagtattttcctcagagcggggttctcatcttcggaaaacaagactcgggaaaaactaatgtggacattgaaaaggtcatgattacagacgaagaggaaatcaggaccaccaatcccgtggctacggagcagtatggttctgtatctaccaatctccagagcggcaacacacaagcagctacctcagatgtcaacacacaaggcgttcttccaggcatggtctggcaggacagagacgtgtacctgcagggacccatctgggcaaagattccacacacggacggacattttcacccttctcctcttatgggaggatttggactgaagcaccctcccccgcagattctcatcaagaataccccggtacctgcgaatccttctaccaccttcagcgcggcaaagtttgcttccttcatcacacagtactccacggggcaggtcagcgtggagatcgagtgggagctgcagaaagagaacagcaaacgctggaaccccgagatccagtatacctccaactacaacaagtctgttaatgtggactttactgtggacactaatggcgtgtattcagagcctcgccccattggcacaagatacctgactcgtaatctgtaa

SEQ ID NO: 12598 - DNA, 2217 bp, Artificial Sequence
  source: /note="Description of Artificial Sequence: Synthetic polynucleotide"
atggctgccgatggttatcttccagattggctcgaggacaacctctctgagggcattcgcgagtggtgggcgctgaaacctggagccccgaagcccaaagccaaccagcaaaagcaggacgacggccggggtctggtgcttcctggctacaagtacctcggacccttcaacggactcgacaagggggagcccgtcaacgcggcggacgcagcggccctcgagcacgacaaggcctacgaccagcagctgcaggcgggtgacaatccgtacctgcggtataaccacgccgacgccgagtttcaggagcgtctgcaagaagatacgtcttttgggggcaacctcgggcgagcagtcttccaggccaagaagcgggttctcgaacctctcggtctggttgaggaaggcgctaagacggctcctggaaagaagagaccggtagagccatcaccccagcgttctccagactcctctacgggcatcggcaagaaaggccaacagcccgccagaaaaagactcaattttggtcagactggcgactcagagtcagttccagaccctcaacctctcggagaacctccagcagcgccctctggtgtgggacctaatacaatggctgcaggcggtggcgcaccaatggcagacaataacgaaggcgccgacggagtgggtagttcctcgggaaattggcattgcgattccacatggctgggcgacagagtcatcaccgccagcacccgaacctgggccctgcccacctacaacaaccacctctacaagcaaatctccaacgggacatcggggggagccaccaacgacaacacctacttcggctacagcaccccctgggggtattttgactttaacagattccactgccacttttcaccacgtgactggcagcgactcatcaacaacaactggggattccggcccaagagactcagcttcaagctcttcaacatccaggtcaaggaggtcacgcagaatgaaggcaccaagaccatcgccaataacctcaccagcaccatccaggtgtttacggactcggagtaccagctgccgtacgttctcggctctgcccaccagggctgcctgcctccgttcccggcggacgtgttcacgattccccagtacggctacctaacactcaacaacggtagtcaggccgtgggacgctcctccttctactgcctggaatactttccttcgcagatgctgagaaccggcaacaacttccagtttacttacaccttcgaggacgtgcctttccacagcagctacgcccacagccagagcttggaccggctgatgaatcctctgattgaccagtacctgtactacttgtctcggactcaaacaacaggaggcacggcaaatacgcagactctgggcttcagccaaggtgggcctaatacaatggccaatcaggcaaagaactggctgccaggaccctgttaccgccaacaacgcgtctcaacgacaaccgggcaaaacaacaatagcaactttgcctggactgctgggaccaaataccatctgaatggaagaaattcattggctaatcctggcatcgctatggcaacacacaaagacgacgaggagcgtttttttcccagtaacgggatcctgatttttggcaaacaaaatgctgccagagacaatgcggattacagcgatgtcatgctcaccagcgaggaagaaatcaaaaccactaaccctgtggctacagaggaatacggtatcgtggcagataacttgcagcagcaaaacacggctcctcaaattggaactgtcaacagccagggggccttacccggtatggtctggcagaaccgggacgtgtacctgcagggtcccatctgggccaagattcctcacacggacggcaacttccacccgtctccgctgatgggcggctttggcctgaaacatcctccgcctcagatcctgatcaagaacacgcctgtacctgcggatcctccgaccaccttcaaccagtcaaagctgaactctttcatcacgcaatacagcaccggacaggtcagcgtggaaattgaatgggagctgcagaaggaaaacagcaagcgctggaaccccgagatccagtacacctccaactactacaaatctacaagtgtggactttgctgttaatacagaaggcgtgtactctgaaccccgccccattggcacccgttacctcacccgtaatctgtaa

SEQ ID NO: 12599 - DNA, 2217 bp, Artificial Sequence
  source: /note="Description of Artificial Sequence: Synthetic polynucleotide"
atggctgccgatggttatcttccagattggctcgaggacaacctctctgagggcattcgcgagtggtgggcgctgaaacctggagccccgaagcccaaagccaaccagcaaaagcaggacgacggccggggtctggtgcttcctggctacaagtacctcggacccttcaacggactcgacaagggggggcccgtcaacgcggcggacgcagcggccctcgagcacgacaaggcctacgaccagcagctgcaggcgggtgacaatccgtacctgcggtataaccacgccgacgccgagtttcaggagcgtctgcaagaagatacgtcttttgggggcaacctcgggcgagcagtcttccaggccaagaagcgggttctcgaacctctcggtctggttgaggaaggcgctaagacggctcctggaaagaagagaccggtagagccatcaccccagcgttctccagactcctctacgggcatcggcaagaaaggccaacagcccgccagaaaaagactcaattttggtcagactggcgactcagagtcagttccagaccctcaacctctcggagaacctccagcagcgccctctggtgtgggacctaatacaatggctgcaggcggtggcgcaccaatggcagacaataacgaaggcgccgacggagtgggtagttcctcgggaaattggcattgcgattccacatggctgggcgacagagtcatcaccaccagcacccgaacctgggccctgcccacctacaacaaccacctctacaagcaaatctccaacgggacatcgggaggagccaccaacgacaacacctacttcggctacagcaccccctgggggtattttgactttaacagattccactgccacttttcaccacgtgactggcagcgactcatcaacaacaactggggattccggcccaagagactcagcttcaagctcttcaacatccaggtcaaggaggtcacgcagaatgaaggcaccaagaccatcgccaataacctcaccagcaccatccaggtgtttacggactcggagtaccagctgccgtacgttctcggctctgcccaccagggctgcctgcctccgttcccggcggacgtgttcatgattccccagtacggctacctaacactcaacaacggtagtcaggccgtgggacgctcctccttctactgcctggaatactttccttcgcagatgctgagaaccggcaacaacttccagtttacttacaccttcgaggacgtgcctttccacagcagctacgcccacagccagagcttggaccggctgatgaatcctctgattgaccagtacctgtactacttgtctcggactcaaacaacaggaggcacggcaaatacgcagactctgggcttcagccaaggtgggcctaatacaatggccaatcaggcaaagaactggctgccaggaccctgttaccgccaacaacgcgtctcaacgacaaccgggcaaaacaacaatagcaactttgcctggactgctgggaccaaataccatctgaatggaagaaattcattggctaatcctggcatcgctatggcaacacacaaagacgacgaggagcgtttttttcccagtaacgggatcctgatttttggcaaacaaaatgctgccagagacaatgcggattacagcgatgtcatgctcaccagcgaggaagaaatcaaaaccactaaccctgtggctacagaggaatacggtatcgtggcagataacttgcagcagcaaaacacggctcctcaaattggaactgtcaacagccagggggccttacccggtatggtctggcagaaccgggacgtgtacctgcagggtcccatctgggccaagattcctcacacggacggcaacttccacccgtctccgctgatgggcggctttggcctgaaacatcctccgcctcagatcctgatcaagaacacgcctgtacctgcggatcctccgaccaccttcaaccagtcaaagctgaactctttcatcacgcaatacagcaccggacaggtcagcgtggaaattgaatgggagctgcagaaggaaaacagcaagcgctggaaccccgagatccagtacacctccaactactacaaatctacaagtgtggactttgctgttaatacagaaggcgtgtactctgaaccccgccccattggcacccgttacctcacccgtaatctgtaa

SEQ ID NO: 12600 - DNA, 2217 bp, Artificial Sequence
  source: /note="Description of Artificial Sequence: Synthetic polynucleotide"
atggctgccgatggttatcttccagattggctcgaggacaacctctctgagggcattcgcgagtggtgggcgctgaaacctggagccccgaagcccaaagccaaccagcaaaagcaggacgacggccggggtctggtgcttcctggctacaagtacctcggacccttcaacggactcgacaagggggagcccgtcaacgcggcggacgcagcggccctcgagcacgacaaggcctacgaccagcagctgcaggcgggtgacaatccgtacctgcggtataaccacgccgacgccgagtttcaggagcgtctgcaagaagatacgtcttttgggggcaacctcgggcgagcagtcttccaggccaagaagcgggttctcgaacctctcggtctggttgaggaaggcgctaagacggctcctggaaagaagagaccggtagagccatcaccccagcgttctccagactcctctacgggcatcggcaagaaaggccaacagcccgccagaaaaagactcaattttggtcagactggcgactcagagtcagttccagaccctcaacctctcggagaacctccagcagcgccctctggtgtgggacctaatacaatggctgcaggcggtggcgcaccaatggcagacaataacgaaggcgccgacggagtgggtagttcctcgggaaattggcattgcgattccacatggctgggcgacagagtcatcaccaccagcacccgaacctgggccctgcccacctacaacaaccacctctacaggcaaatctccaacgggacatcgggaggagccaccaacgacaacacctacttcggctacagcaccccctgggggtattttgactttaacagattccactgccacttttcaccacgtgactggcagcgactcatcaacaacaactggggattccggcccaagagactcagcttcaagctcttcaacatccaggtcaaggaggtcacgcagaatgaaggcaccaagaccatcgccaataacctcaccagcaccatccaggtgtttacggactcggagtaccagctgccgtacgttctcggctctgcccaccagggctgcctgcctccgttcccggcggacgtgttcatgattccccagtacggctacctaacactcaacaacggtagtcaggccgtgggacgctcctccttctactgcctggaatactttccttcgcagatgctgagaaccggcaacaacttccagtttacttacaccttcgaggacgtgcctttccacagcagctacgcccacagccagagcttggaccggctgatgaatcctctgattgaccagtacctgtactacttgtctcggactcaaacaacaggaggcacggcaaatacgcagactctgggcttcagccaaggtgggcctaatacaatggccaatcaggcaaagaactggctgccaggaccctgttaccgccaacaacgcgtctcaacgacaaccgggcaaaacaacaatagcaactttgcctggactgctgggaccaaataccatctgaatggaagaaattcattggctaatcctggcatcgctatggcaacacacaaagacgacgaggagcgtttttttcccagtaacgggatcctgatttttggcaaacaaaatgctgccagagacaatgcggattacagcgatgtcatgctcaccagcgaggaagaaatcaaaaccactaaccctgtggctacagaggaatacggtatcgtggcagataacttgcagcagcaaaacacggctcctcaaattggaactgtcaacagccagggggccttacccggtatggtctggcagaaccgggacgtgtacctgcagggtcccatctgggccaagattcctcacacggacggcaacttccacccgtctccgctgatgggcggctttggcctgaaacatcctccgcctcagatcctgatcaagaacacgcctgtacctgcggatcctccgaccaccttcaaccagtcaaagctgaactctttcatcacgcaatacagcaccggacaggtcagcgtggaaattgaatgggagctgcagaaggaaaacagcaagcgctggaaccccgagatccagtacacctccaactactacaaatctacaagtgtggactttgctgttaatacagaaggcgtgtactctgaaccccgccccattggcacccgttacctcacccgtaatctgtaa

SEQ ID NO: 12601 - DNA, 2217 bp, Artificial Sequence
  source: /note="Description of Artificial Sequence: Synthetic polynucleotide"
atggctgccgatggttatcttccagattggctcgaggacaacctctctgagggcattcgcgagtggtgggcgctgaaacctggagccccgaagcccaaagccaaccagcaaaagcaggacgacggccggggtctggtgcttcctggctacaagtacctcggacccttcaacggactcgacaagggggagcccgtcaacgcggcggacgcagcggccctcgagcacgacaaggcctacgaccagcagctgcaggcgggtgacaatccgtacctgcggtataaccacgccgacgccgagttccaggagcgtctgcaagaagatacgtcttttgggggcaacctcgggcgagcagtcttccaggccaagaagcgggttctcgaacctctcggtctggttgaggaaggcgctaagacggctcctggaaagaagagaccggtagagccatcaccccagcgttctccagactcctctacgggcatcggcaagaaaggccaacagcccgccagaaaaagactcaattttggtcagactggcgactcagagtcagttccagaccctcaacctctcggagaacctccagcagcgccctctggtgtgggacctaatacaatggctgcaggcggtggcgcaccaatggcagacagtaacgaaggcgccgacggagtgggtagttcctcgggaaattggcattgcgattccacatggctgggcgacagagtcatcaccaccagcacccgaacctgggccctgcccacctacaacaaccacctctacaagcaaatctccaacgggacatcgggaggagccaccaacgacaacacctacttcggctacagcaccccctgggggtattttgactttaacagattccactgccacttttcaccacgtgactggcagcgactcatcaacaacaactggggattccggcccaagagactcagcttcaagctcttcaacatccaggtcaaggaggtcacgcagaatgaaggcaccaagaccatcgccaataacctcaccagcaccatccaggtgtttacggactcggagtaccagctgccgtacgttctcggctctgcccaccagggctgcctgcctccgttcccggcggacgtgttcatgattccccagtacggctacctaacactcaacaacggtagtcaggccgtgggacgctcctccttctactgcctggaatactttccttcgcagatgctgagaaccggcaacaacttccagtttacttacaccttcgaggacgtgcctttccacagcagctacgcccacagccagagcttggaccggctgatgaatcctctgattgaccagtacctgtactacttgtctcggactcaaacaacaggaggcacggcaaatacgcagactctgggcttcagccaaggtgggcctaatacaatggccaatcaggcaaagaactggctgccaggaccctgttaccgccaacaacgcgtctcaacgacaaccgggcaaaacaacaatagcaactttgcctggactgctgggaccaaataccatctgaatggaagaaattcattggctaatcctggcatcgctatggcaacacacaaagacgacgaggagcgtttttttcccagtaacgggatcctgatttttggcaaacaaaatgctgccagagacaatgcggattacagcgatgtcatgctcaccagcgaggaagaaatcaaaaccactaaccctgtggctacagaggaatacggtatcgtggcagataacttgcagcagcaaaacacggctcctcaaattggaactgtcaacagccagggggccttacccggtatggtctggcagaaccgggacgtgtacctgcagggtcccatctgggccaagattcctcacacggacggcaacttccacccgtctccgctgatgggcggctttggcctgaaacatcctccgcctcagatcctgatcaagaacacgcctgtacctgcggatcctccgaccaccttcaaccagtcaaagctgaactctttcatcacgcaatacagcaccggacaggtcagcgtggaaattgaatgggagctgcagaaggaaaacagcaagcgctggaaccccgagatccagtacacctccaactactacaaatctacaagtgtggactttgctgttaatacagaaggcgtgtactctgaaccccgccccattggcacccgttacctcacccgtaatctgtaa

SEQ ID NO: 12602 - DNA, 2217 bp, Artificial Sequence
  source: /note="Description of Artificial Sequence: Synthetic polynucleotide"
atggctgccgatggttatcttccagattggctcgaggacaacctctctgagggcattcgcgagtggtgggcgctgaaacctggagccccgaagcccaaagccaaccagcaaaagcaggacgacggccggggtctggtgcttcctggctacaagtacctcggacccttcaacggactcgacaagggggagcccgtcaacgcggcggacgcagcggccctcgagcacgacaaggcctacgaccagcagctgcaggcgggtgacaatccgtacctgcggtataaccacgccgacgccgagtttcaggagcgtctgcaagaagatacgtcttttgggggcaacctcgggcgagcagtcttccaggccaagaagcgagttctcgaacctctcggtctggttgaggaaggcgctaagacggctcctggaaagaagagaccggtagagccatcaccccagcgttctccagactcctctacgggcatcggcaagaaaggccaacagcccgccagaaaaagactcaattttggtcagactggcgactcagagtcagttccagaccctcaacctctcggagaacctccagcagcgccctctggtgtgggacctaatacaatggctgcaggcggtggcgcaccaatggcagacaataacgaaggcgccgacggagtgggtagttcctcgggaaattggcattgcgattccacatggctgggcgacagagtcatcaccaccagcacccgaacctgggccctgcccacctacaacaaccacctctacaagcaaatctccaacgggacgtcgggaggagccaccaacgacaacacctacttcggctacagcaccccctgggggtattttgactttaacagattccactgccacttttcaccacgtgactggcagcgactcatcaacaacaactggggattccggcccaagagactcagcttcaagctcttcaacatccaggtcaaggaggtcacgcagaatgaaggcaccaagaccatcgccaataacctcaccagcaccatccaggtgtttacggactcggagtaccagctgccgtacgttctcggctctgcccaccagggctgcctgcctccgttcccggcggacgtgttcatgattccccagtacggctacctaacactcaacaacggtagtcaggccatgggacgctcctccttctactgcctggaatactttccttcgcagatgctgagaaccggcaacaacttccagtttacttacaccttcgaggacgtgcctttccacagcagctacgcccacagccagagcttggaccggctgatgaatcctctgattgaccagtacctgtactacttgtctcggactcaagcaacaggaggcacggcaaatacgcagactctgggcttcagccaaggtgggcctaatacaatggccaatcaggcaaagaactggctgccaggaccctgttaccgccaacaacgcgtctcaacgacaaccgggcaaaacaacaatagcaactttgcctggactgctgggaccaaataccatctgaatggaagaaattcattggctaatcctggcatcgctatggcaacacacaaagacgacgaggagcgtttttttcccagtaacgggatcctgatttttggcaaacaaaatgctgccagagacaatgcggattacagcgatgtcatgctcaccagcgaggaagaaatcaaaaccactaaccctgtggctacagaggaatacggtatcgtggcagataacttgcagcagcaaaacacggctcctcaaattggaactgtcaacagccagggggccttacccggtatggtctggcagaaccgggacgtgtacctgcagggtcccatctgggccaagattcctcacacggacggcaacttccacccgtctccgctgatgggcggctttggcctgaaacatcctccgcctcagatcctgatcaagaacacgcctgtacctgcggatcctccgaccaccttcaaccagtcaaagctgaactctttcatcacgcaatacagcaccggacaggtcagcgtggaaattgaatgggagctgcagaaggaaaacagcaagcgctggaaccccgagatccagtacacctccaactactacaaatctacaagtgtggactttgctgttaatacagaaggcgtgtactctgaaccccgccccattggcacccgttacctcacccgtaatctgtaa

SEQ ID NO: 12603 - DNA, 2217 bp, Artificial Sequence
  source: /note="Description of Artificial Sequence: Synthetic polynucleotide"
atggctgccgatggttatcttccagattggctcgaggacaacctctctgagggcattcgcgagtggtgggcgctgaaacctggagccccgaagcccaaagccaaccagcaaaagcaggacgacggccggggtctggtgcttcctggctacaagtacctcggacccttcaacggactcgacaagggggagcccgtcaacgcggcggacgcagcggccctcgagcacgacaaggcctacgaccagcagctgcaggcgggtaacaatccgtacctgcggtataaccacgccgacgccgagtttcaggagcgtctgcaagaagatacgtcttttgggggcaacctcgggcgagcagtcttccaggccaagaagcgggttctcggacctctcggtctggttgaggaaggcgctaagacggctcctggaaagaagagaccggtagagccatcaccccagcgttctccagactcctctacgggcatcggcaagaaaggccaacagcccgccagaaaaagactcaattttggtcagactggcgactcagagtcagttccagaccctcaacctctcggagaacctccagcagcgccctctggtgtgggacctaatacaatggctgcaggcggtggcgcaccaatggcagacaataacgaaggcgccgacggagtgggtagttcctcgggaaattggcattgcgattccacatggctgggcgacagagtcatcaccaccagcacccgaacctgggccctgcccacctacaacaaccacctctacaagcaaatctccaacgggacatcgggaggagccaccaacgacaacacctacttcggctacagcaccccctgggggtattttgactttaacagattccactgccacttttcaccacgtgactggcagcgactcatcaacaacaactggggattccggcccaagagactcagcttcaagctcttcaacatccaggtcaaggaggtcacgcagaatgaaggcaccaagaccatcgccaataacctcaccagcaccatccaggtgtttacggactcggagtaccagctgccgtacgttctcggctctgcccaccagggctgcctgcctccgttcccggcggacgtgttcatgattccccagtacggctacctaacactcaacaacggtagtcgggccgtgggacgctcctccttctactgcctggaatactttccttcgcagatgctgagaaccggcaacaacttccagtttacttacaccttcgaggacgtgcctttccacagcagctacgcccacagccagagcttggaccggctgatgaatcctctgattgaccagtacctgtactacttgtctcggactcaaacaacaggaggcacggcaaatacgcagactctgggcttcagccaaggtgggcctaatacaatggccaatcaggcaaagaactggctgccaggaccctgttaccgccaacaacgcgtctcaacgacaaccgggcaaaacaacaatagcaactttgcctggactgctgggaccaaataccatctgaatggaagaaattcattggctaatcctggcatcgctatggcaacacacaaagacgacgaggagcgtttttttcccagtaacgggatcctgatttttggcaaacaaaatgctgccagagacaatgcggattacagcgatgtcatgctcaccagcgaggaagaaatcaaaaccactaaccctgtggctacagaggaatacggtatcgtggcagataacttgcagcagcaaaacacggctcctcaaattggaactgtcaacagccagggggccttacccggtatggtctggcagaaccgggacgtgtacctgcagggtcccatctgggccaagattcctcacacggacggcaacttccacccgtctccgctgatgggcggctttggcctgaaacatcctccgcctcagatcctgatcaagaacacgcctgtacctgcggatcctccgaccaccttcaaccagtcaaagctgaactctttcatcacgcaatacagcaccggacaggtcagcgtggaaattgaatgggagctgcagaaggaaaacagcaagcgctggaaccccgagatccagtacacctccaactactacaaatctacaagtgtggactttgctgttaatacagaaggcgtgtactctgaaccccgccccattggcacccgttacctcacccgtaatctgtaa

SEQ ID NO: 12604 - DNA, 2217 bp, Artificial Sequence
  source: /note="Description of Artificial Sequence: Synthetic polynucleotide"
atggctgccgatggttatcttccagattggctcgaggacaacctctctgagggcattcgcgagtggtgggcgctgaaacctggagccccgaagcccaaagccaaccagcaaaagcaggacgacggccggggtctggtgcttcctggctacaagtacctcggacccttcaacggactcgacaagggggagcccgtcaacgcggcggacgcagcggccctcgagcacgacaaggcctacgaccagcagctgcaggcgggtgacaatccgtacctgcggtataaccacgccgacgccgagtttcaggagcgtctgcaagaagatacgtcttttgggggcaacctcgggcgagcagtcttccaggccaagaagcgggttctcgaacctctcggtctggttgaggaaggcgctaagacggctcctggaaagaagagaccggtagagccatcaccccagcgttctccagactcctctacgggcatcggcaagaaaggccaacagcccgccagaaaaagactcaattttggtcagactggcgactcagagtcagttccagaccctcaacctctcggagaacctccagcagcgccctctggtgtgggacctaatacaatggctgcaggcggtggcgcaccaatggcagacaataacgaaggcgccgacggagtgggtagttcctcgggaaattggcattgcgattccacatggctgggcgacagagtcatcaccaccagcacccgaacctgggccctgcccacctacaacaaccacctctacaagcaaatctccaacgggacatcgggaggagccaccaacgacaacacctacttcggctacagcaccccctgggggtattttgactttaacagattccactgccacttttcaccacgcgactggcagcgactcatcaacaacaactggggattccggcccaagagactcagcttcaagctcttcaacatccaggtcaaggaggtcacgcagaatgaaggcaccaagaccatcgccaataacctcaccagcaccatccaggtgtttacggactcggagtaccagctgccgtacgttctcggctctgcccaccagggctgcctgcctccgttcccggcggacgtgttcatgattccccagtacggctacctaacactcaacaacggtagtcaggccgtgggacgctcctccttctactgcctggaatactttccttcgcagatgctgagaaccggcaacaacttccagtttacttacaccttcgaggacgtgcctttccacagcagctacgcccacagccagagcttggaccggctgatgaatcctctgattgaccagtacctgtactacttgtctcggactcaaacaacaggaggcacggcaaatacgcagactctgggcttcagccaaggtgggcctaatacaatggccaatcaggcaaagaactggctgccaggaccctgttaccgccaacaacgcgtctcaacgacaaccgggcaaaacaacaatagcgactttgcctggactgctgggaccaaataccatctgaatggaagaaattcattggctaatcctggcatcgctatggcaacacacaaagacgacgaggagcgtttttttcccagtaacgggatcctgatttttggcaaacaaaatgctgccagagacaatgcggattacagcgatgtcatgctcaccagcgaggaagaaatcaaaaccactaaccctgtggctacagaggaatacggtatcgtggcagataacttgcagcagcaaaacacggctcctcaaattggaactgtcaacagccagggggccttacccggtatggtctggcagaaccgggacgtgtacctgcagggtcccgtctgggccaagattcctcacacggacggcaacttccacccgtctccgctgatgggcggctttggcctgaaacatcctccgcctcagatcctgatcaagaacacgcctgtacctgcggatcctccgaccaccttcaaccagtcaaagctgaactctttcatcacgcaatacagcaccggacaggtcagcgtggaaattgaatgggagctgcagaaggaaaacagcaagcgctggaaccccgagatccagtacacctccaactactacaaatctacaagtgtggactttgctgttaatacagaaggcgtgtactctgaaccccgccccattggcacccgttacctcacccgtaatctgtaa

SEQ ID NO: 12605 - DNA, 2217 bp, Artificial Sequence
  source: /note="Description of Artificial Sequence: Synthetic polynucleotide"
atggctgccgatggttatcttccagattggctcgaggacaacctctctgagggcattcgcgagtggtgggcgctgaaacctggagccccgaagcccaaagccaaccagcaaaagcaggacgacggccggggtctggtgcttcctggctacaagtacctcggacccttcaacggactcgacaagggggagcccgtcaacgcggcggacgcagcggccctcgagcacgacaaggcctacgaccagcagctgcaggcgggtgacaatccgtacctgcggtataaccacgccgacgccgagtttcaggagcgtctgcaagaagatacgtcttttgggggcagcctcgggcgagcagtcttccaggccaagaagcgggttctcgaacctctcggtctggttgaggaaggcgctaagacggctcctggaaagaagagaccggtagagccatcaccccagcgttctccagactcctctacgggcatcggcaagaaaggccaacagcccgccagaaaaagactcaattttggtcagactggcgactcagagtcagttccagaccctcaacctctcggagaacctccagcagcgccctctggtgtgggacctaatacaatggctgcaggcggtggcgcaccaatggcagacaataacgaaggcgccgacggagtgggtagttcctcgggaaattggcattgcgattccacatggctgggcgacagagtcatcaccaccagcacccgaacctgggccctgcccacctacaacaaccacctctacaagcaaatctccaacgggacatcgggaggagccaccaacgacaacacctacttcggctacagcaccccctgggggtattttgactttaacagattccactgccacttttcaccacgtgactggcagcgactcatcaacaacaactggggattccggcccaagagactcagcttcaagctcttcaacatccaggtcaaggaggtcacgcagaatgaaggcaccaagaccatcgccaataacctcaccagcaccatccaggtgtttacggactcggagtaccagctgccgtacgttctcggctctgcccaccagggctgcctgcctccgttcccggcggacgtgttcatgattccccagtacggctacctaacactcaacaacggtagtcaggccgtgggacgctcctccttctactgcctggaatactttccttcgcagatgctgagaaccggcaacaacttccagtttacttacaccttcgaggacgtgcctttccacagcagctacgcccacagccagagcttggaccggctgatgaatcctctgattgaccagtacctgtactacttgtctcggactcaaacaacaggaggcacggcaaatacgcagaccctgggcttcagccaaggtgggcctaatacaatggccaatcaggcaaagaactggctgccaggaccctgttaccgccaacaacgcgtctcaacgacaaccgggcaaaacaacaatagcaactttgcctggactgctgggaccaaataccatctgaatggaagaaattcattggctaatcctggcatcgctatggcaacacacaaagacgacgaggagcgtttttttcccagtaacgggatcctgatttttggcaagcaaaatgctgccagagacaatgcggattacagcgatgtcatgctcaccagcgaggaagaaatcaaaaccactaaccctgtggctacagaggaatacggtatcgtggcagataacttgcagcagcaaaacacggctcctcaaattggaactgtcaacagccagggggccttacccggtatggtctggcagaaccgggacgtgtacctgcagggtcccatctgggccaagattcctcacacggacggcaacttccacccgtctccgctgatgggcggctttggcctaaaacatcctccgcctcagatcctgatcaagaacacgcctgtacctgcggatcctccgaccaccttcaaccagtcaaagctgaactctttcatcacgcaatacagcaccggacaggtcagcgtggaaattgaatgggagctgcagaaggaaaacagcaagcgctggaaccccgagatccagtacacctccaactactacaaatctacaagtgtggactttgctgttaatacagaaggcgtgtactctgaaccccgccccattggcacccgttacctcacccgtaatctgtaa

SEQ ID NO: 12606 - DNA, 2217 bp, Artificial Sequence
  source: /note="Description of Artificial Sequence: Synthetic polynucleotide"
atggctgccgatggttatcttccagattggctcgaggacaacctctctgagggcattcgcgagtggtgggcgctgaaacctggagccccgaagcccaaagccaaccagcaaaagcaggacgacggccggggtctggtgcttcctggctacaagtacctcggacccttcaacggactcgacaagggggagcccgtcaacgcggcggacgcagcggccctcgagcacgacaaggcctacgaccagcagctgcaggcgggtgacaatccgtaccagcggtataaccacgccgacgccgagtttcaggagcgtctgcaagaagatacgtcttttgggggcaacctcgggcgagcagtcttccaggccaagaagcgggttctcgaacctctcggtctggttgaggaaggcgctaagacggctcctggaaagaagagaccggtagagccatcaccccagcgttctccagactcctctacgggcatcggcaagaaaggccaacagcccgccagaaaaagactcaattttggtcagactggcgactcagagtcagttccagaccctcaacctctcggagaacctccagcagcgccctctggtgtgggacctaatacaatggctgcaggcggtggcgcaccaatggcagacaataacgaaggcgccgacggagtgggtagttcctcgggaaattggcattgcgattccgcatggctgggcgacagagtcatcaccaccagcacccgaacctgggccctgcccacctacaacaaccacctctacaagcaaatctccaacgggacatcgggaggagccaccaacgacaacacctacttcggctacagcaccccctgggggtattttgactttaacagattccactgccacttttcaccacgtgactggcagcgactcatcaacaacaactggggattccggcccaagagactcagcttcaagctcttcaacatccaggtcaaggaggtcacgcagaatgaaggcaccaagaccatcgccaataacctcaccagcaccatccaggtgtttacggactcggagtaccagctgccgtacgttctcggctctgcccaccagggctgcctgcctccgttcccggcggacgtgttcacgattccccagtacggctacctaacactcaacaacggtagtcaggccgtgggacgctcctccttctactgcctggaatactttccttcgcagatgctgagaaccggcaacaacttccagtttacttacaccttcgaggacgtgcctttccacagcagctacgcccacagccagagcttggaccggctgatgaatcctctgattgaccagtacctgtactacttgtctcggactcaaacaacaggaggcacggcaaatacgcagactctgggcttcagccaaggtgggcctaatacaatggccaatcaggcaaagaactggctgccaggaccctgttaccgccaacaacgcgtctcaacgacaaccgggcaaaacaacaatagcaactttgcctggactgctgggaccaaataccatctgaatggaagaaattcattggctaatcctggcatcgctatggcaacacacaaagacgacgaggagcgtttttttcccagtaacgggatcctgatttttggcaaacaaaatgctgccagagacaatgcggattacagcgatgtcatgctcaccagcgaggaagaaatcaaaaccactaaccctgtggctacagaggaatacggtatcgtggcagataacttgcagcagcaaaacacggctcctcaaattggaactgtcaacagccagggggccttacccggtatggtctggcagaaccgggacgtgtacctgcagggtcccatctgggccaagattcctcacacggacggcaacttccacccgtctccgctgatgggcggctttggcctgaaacatcctccgcctcagatcctgatcaagaacacgcctgtacctgcggatcctccgaccaccttcaaccagtcaaagctgaactctttcatcacgcaatacagcaccggacaggtcagcgtggaaattgaatgggagctgcagaaggaaaacagcaagcgctggaaccccgagatccagtacacctccaactactacaaatctacaagtgtggactttgctgttaatacagaaggcgtgtactctgaaccccgccccattggcacccgttacctcacccgtaatctgtaa

SEQ ID NO: 12607 - DNA, 2217 bp, Artificial Sequence
  source: /note="Description of Artificial Sequence: Synthetic polynucleotide"
atggctgccgatggttatcttccagattggctcgaggacaacctctctgagggcattcgcgagtggtgggcgctgaaacctggagccccgaagcccaaagccaaccagcaaaagcaggacgacggccggggtctggtgcttcctggctacaagtacctcggacccttcaacggactcgacaagggggagcccgtcaacgcggcggacacggcggccctcgagcacgacaaggcctacgaccagcagctgcaggcgggtgacaatccgtacctgcggtataaccacgccgacgccgagtttcaggagcgtctgcaagaagatacgtcttttgggggcaacctcgggcgagcagtcttccaggccaagaagcgggttctcgaacctctcggtctggttgaggaaggcgctaagacggctcctggaaagaagagaccggtagagccatcaccccagcgttctccagactcctctacgggcatcggcaagaaaggccaacagcccgccagaaaaagactcaattttggtcagactggcgactcagagtcagttccagaccctcaacctctcggagaacctccagcagcgccctctggtgtgggacctaatacaatggctgcaggcggtggcgcaccaatggcagacaataacgaaggcgccgacggagtgggtagttcctcgggaaattggcattgcgattccacatggctgggcgacagagtcatcaccaccagcacccgaacctgggccctgcccacctacaacaaccacctctacaagcaaatctccaacgggacatcgggaggagccaccaacgacaacacctacttcggctacagcaccccctgggggtattttgactttaacagattccactgccacttttcaccacgtgactggcagcgactcatcaacaacaactggggattccggcccaagagactcagcttcaagctcttcaacatccaggtcaaggaggtcacgcagaatgaaggcaccaagaccatcgccaataacctcaccagcaccatccaggtgtttacggactcggagtaccagctgccgtacgttctcggctctgcccaccagggctgcctgcctccgttcccggcggacgtgttcatgattccccagtacggctacctaacactcaacaacggtagtcaggccgtgggacgctcctccttctactgcctggaatactttccttcgcagatgctgagaaccggcaacaacttccagtttacttacaccttcgaggacgtgcctttccacagcagctacgcccacagccagagcttggaccggctgatgaatcctctgattgaccagtacctgtactacttgtctcggactcaaacaacaggaggcacggcaaatacgcagactctgggcttcagccaaggtgggcctaatacaatggccaatcaggcaaagaactggctgccaggaccctgttaccgccaacaacgcgtctcaacgacaaccgggcaaaacaacaatagcaactttgcctggactgctgggaccaaataccatctgaatggaagaaattcattggctaatcctggcatcgctatggcaacacacaaagacgacgaggagcgtttttttcccagtaacgggatcctgatttttggcaaacaaaatgctgccagagacaatgcggattacagcgatgtcatgctcaccagcgaggaagaaatcaaaaccactaaccctgtggctacagaggaatacggtatcgtggcagataacttgcagcagcaaaacacggctcctcaaattggaactgtcaacagccagggggccttacccggtatggtctggcagaaccgggacgtgtacctgcagggtcccatctgggccaagattcctcacacggacggcaacttccacccgtctccgctgatgggcggctttggcctgaaacatcctccgcctcagatcctgatcaagaacacgcctgtacctgcggatcctccgaccaccttcaaccagtcaaagctgaactctttcatcacgcaatacagcaccggacaggtcagcgtggaaattgaatgggagctgcagaaggaaaacagcaagcgctggaaccccgagatccagtacacctccaactactacaaatctacaagtgtggactttgctgttaatacagaaggcgtgtactctgaaccccgccccattggcacccgttacctcacccgtaatctgtaa

SEQ ID NO: 12608 - DNA, 2217 bp, Artificial Sequence
  source: /note="Description of Artificial Sequence: Synthetic polynucleotide"
atggctgccgatggttatcttccagattggctcgaggacaacctctctgagggcattcgcgagtggtgggcgctgaaacctggagccccgaagcccaaagccaaccagcaaaagcaggacgacggccggggtctggtgcttcctggctacaagtacctcggacccttcaacggactcgacaagggggagcccgtcaacgcggcggacgcagcggccctcgagcacgacaaggcctacgaccagcagctgcaggcgggtgacaatccgtacctgcggtataaccacgccgacgccgagtttcaggagcgtctgcaagaagatacgtcttttgggggcaacctcgggcgagcagtcttccaggccaagaagcgggttctcgaacctctcggtctggttgaggaaggcgctaagacggctcctggaaagaagagaccggtagagccatcaccccagcgttctccagactcctctacgggcatcggcaagaaaggccaacagcccgccagaaaaagactcaattttggtcagactggcgactcagagtcagttccagaccctcaacctctcggagaacctccagcagcgccctctggtgtgggacctaatacaatggctgcaggcggtggcgcaccaatggcagacaataacgagggcgccgacggagtgggtagttcctcgggaaattggcattgcgattccacatggctgggcgacagagtcatcaccaccagcacccgaacctgggccctgcccacctacaacaaccacctctacaagcaaatctccaacgggacatcgggaggagccaccaacgacaacacctacttcggctacagcaccccctgggggtattttgactttaacagattccactgccacttttcaccacgtgactggcagcgactcatcaacaacaactggggattccggcccaagagactcagcttcaagctcttcaacatccaggtcaaggaggtcacgcagaatgaaggcaccaagaccatcgccaataacctcaccagcaccatccaggtgtttacggactcggagtaccagctgccgtacgttctcggctctgcccaccagggctgcctgcctccgttcccggcggacgtgttcatgattccccagtacggctacctgacactcaacaacggtagtcaggccgtgggacgctcctccttctactgcctggaatactttccttcgcagatgctgagaaccggcaacaacttccagtttacttacaccttcgaggacgtgcctttccacagcagctacgcccacagccagagcttggaccggctgatgaatcctctgattgaccagtacctgtactacttgtctcggactcaaacaacaggaggcacggcaaatacgcagactctgggcttcagccaaggtgggcctaatacaatggccaatcaggcaaagaactggctgccaggaccctgttaccgccaacaacgcgtctcaacgacaaccgggcaaaacaacaatagcaactttgcctggactgctgggaccaaataccatctgaatggaagaaattcattggctaatcctggcatcgctatggcaacacacaaagacgacgaggagcgtttttttcccagtaacgggatcctgatttttggcaaacaaaatgctgccagagacaatgcggattacagcgatgtcatgctcaccagcgaggaagaaatcaaaaccactaaccctgtggctacagaggaatacggtatcgtggcagataacttgcagcagcaaaacgcggctcctcaaattggaactgtcaacagccagggggccttacccggtatggtctggcagaaccgggacgtgtacctgcagggtcccatctgggccaagattcctcacacggacggcaacttccacccgtctccgctgatgggcggctttggcctgaaacatcctccgcctcagatcctgatcaagaacacgcctgtacctgcggatcccccgaccaccttcaaccagtcaaagctgaactctttcatcacgcaatacagcaccggacaggtcagcgtggaaattgaatgggagctgcagaaggaaaacagcaagcgctggaaccccgagatccagtacacctccaactactacaaatctacaagtgtggactttgctgttaatacagaaggcgtgtactctgaaccccgccccattggcacccgttacctcacccgtaatctgtaa

SEQ ID NO: 12609 - DNA, 2217 bp, Artificial Sequence
  source: /note="Description of Artificial Sequence: Synthetic polynucleotide"
atggctgccgatggttatcttccagattggctcgaggacaacctctctgagggcattcgcgagtggtgggcgctgaaacctggagccccgaagcccaaagccaaccagcaaaagcaggacgacggccggggtctggtgcttcctggctacaagtacctcggacccttcaacggactcgacaagggggagcccgtcaacgcggcggacgcagcggccctcgagcacgacaaggcctacgaccagcagctgcaggcgggtgacaatccgtacctgcggtataaccacgccgacgccgagtttcaggagcgtctgcaagaagatacgtcttttgggggcaacctcgggcgagcagtcttccaggccaagaagcgggttctcgaacctctcggtctggttgaggaaggcgctaagacggctcctggaaagaagagaccggtagagccatcaccccagcgttctccagactcctctacgggcatcggcaagaaaggccaacagcccgccagaaaaagactcaattttggtcagactggcgactcagagtcagttccagaccctcaacctctcggagaacctccagcagcgccctctggtgtgggacctaatacaatggctgcaggcggtggcgcaccaatggcagacaataacgaaggcgccgacggagtgggtagttcctcgggaaattggcattgcgattccacatggctgggcgacagagtcatcaccaccagcacccgaacctgggccctgcccacctacaacaaccacctctacaagcaaatctccaacgggacatcgggaggagccaccaacgacaacacctacttcggctacagcaccccctgggggtattttgactttaacagattccactgccacttttcaccacgtgactggcagcgactcatcaacaacaactggggattccggcccaagagactcagcttcaagctcttcaacatccaggtcaaggaggtcacgcagaatgaaggcaccaagaccatcgccaataacctcaccagcaccatccaggtgtttacggactcggagtaccagctgccgtacgttctcggctctgcccaccagggctgcctgcctccgttcccggcggacgtgttcacgattccccagtacggctacctaacactcaacaacggtagtcaggccgtgggacgctcctccttctactgcctggaatactttccttcgcagatgctgagaaccggcaacaacttccagtttacttacaccttcgaggacgtgcctttccacagcagctacgcccacagccagagcttggaccggctgatgaatcctctgattgaccagtacctgtactacttgtctcggactcaaacaacaggaggcacggcaaatacgcagactctgggcttcagccaaggtgggcctaatacaatggccaatcaggcaaagaactggctgccaggaccctgttaccgccaacaacgcgtctcaacgacaaccgggcgaaacaacaatagcaactttgcctggactgctgggaccaaataccatctgaatggaagaaattcattggctaatcctggcatcgctatggcaacacacaaagacgacgaggagcgtttttttcccagtaacgggatcctgatttttggcaaacaaaatgctgccagagacaatgcggattacagcgatgtcatgctcaccagcgaggaagaaatcaaaaccactaaccctgtggctacagaggaatacggtatcgtggcagataacttgcagcagcaaaacacggctcctcaaattggaactgtcaacagccagggggccttacccggtatggtctggcagaaccgggacgtgtacctgcagggtcccatctgggccaagattcctcacacggacggcaacttccacccgtctccgctgatgggcggctttggcctgaaacatcctccgcctcagatcctgatcaagaacacgcctgtacctgcggatcctccgaccaccttcaaccagtcaaagctgaactctttcatcacgcaatacagcaccggacaggtcagcgtggaaattgaatgggagctgcagaaggaaaacagcaagcgctggaaccccgagatccagtacacctccaactactacaaatctacaagtgtggactttgctgttaatacagaaggcgtgtactctgaaccccgccccattggcacccgttacctcacccgtaatctgtaa

SEQ ID NO: 12610 - DNA, 2217 bp, Artificial Sequence
  source: /note="Description of Artificial Sequence: Synthetic polynucleotide"
atggctgccgatggttatcttccagattggctcgaggacaacctctctgagggcattcgcgagtggtgggcgctgaaacctggagccccgaagcccaaagccaaccagcaaaagcaggacgacggccggggtctggtgcttcctggctacaagtacctcggacccttcaacggactcgacaagggggagcccgtcaacgcggcggacgcagcggccctcgagcacgacaaggcctacgaccagcagctgcaggcgggtgacaatccgtacctgcggtataaccacgccgacgccgagtttcaggagcgtctgcaagaagatacgtcttttgggggcaacctcgggcgagcggtcttccaggccaagaagcgggttctcgaacctctcggtctggttgaggaaggcgctaagacggctcctggaaagaagagaccggtagagccatcaccccagcgttctccagactcctctacgggcatcggcaagaaaggccaacagcccgccagaaaaagactcaattttggtcagactggcgactcagagtcagttccagaccctcaacctctcggagaacctccagcagcgccctctggtgtgggacctaatacaatggctgcaggcggtggcgcaccaatggcagacaataacgaaggcgccgacggagtgggtagttcctcgggaaattggcattgcgattccacatggctgggcgacagagtcatcaccaccagcacccgaacctgggccctgcccacctacaacaaccacctctacaagcaaatctccaacgggacatcggggggagccaccaacgacaacacctacttcggctacagcaccccctgggggtattttgactttaacagattccactgccacttttcaccacgtgactggcagcgactcatcaacaacaactggggattccggcccaagagactcagcttcaagctcttcaacatccaggtcaaggaggtcacgcagaatgaaggcaccaagaccatcgccaataacctcaccagcaccatccaggtgtttacggactcggagtaccagctgccgtacgttctcggctctgcccaccagggctgcctgcctccgttcccggcggacgtgttcacgattccccagtacggctacctaacactcaacaacggtagtcaggccgtgggacgctcctccttctactgcctggaatactttccttcgcagatgctgagaaccggcaacaacttccagtttacttacaccttcgaggacgtgcctttccacagcagctacgcccacagccagagcttggaccggctgatgaatcctctgattgaccagtacctgtactacttgtctcggactcaaacaacaggaggcacggcaaatacgcagactctgggcttcagccaaggtgggcctaatacaatggccaatcaggcaaagaactggctgccaggaccctgttaccgccaacaacgcgtctcaacgacaaccgggcaaaacaacaatagcaactttgcctggactgctgggaccaaataccatctgaatggaagaaattcattggctaatcctggcatcgctatggcaacacacaaagacgacgaggagcgtttttttcccagtaacgggatcctgatttttggcaaacaaaatgctgccagagacaatgcggattacagcgatgtcgtgctcaccagcgaggaagaaatcaaaaccactaaccctgtggctacagaggaatacggtatcgtggcagataacttgcagcagcaaaacacggctcctcaaattggaactgtcaacagccagggggccttacccggtatggtctggcagaaccgggacgtgtacctgcagggtcccatctgggccaagattcctcacacggacggcaacttccacccgtctccgctgatgggcggctttggcctgaaacatcctccgcctcagatcctgatcaagaacacgcctgtacctgcggatcctccgaccaccttcaaccagtcaaagctgaactctttcatcacgcaatacagcaccggacaggtcagcgtggaaattgaatgggagctgcagaaggaaaacagcaagcgctggaaccccgagatccagtacacctccaactactacaaatctacaagtgtggactttgctgttaatacagaaggcgtgtactctgaaccccgccccattggcacccgttacctcacccgtaatctgtaa

SEQ ID NO: 12611 - DNA, 2217 bp, Artificial Sequence
  source: /note="Description of Artificial Sequence: Synthetic polynucleotide"
atggctgccgatggttatcttccagattggctcgaggacaacctctctgagggcattcgcgagtggtgggcactgaaacctggagccccgaagcccaaagccaaccagcaaaagcaggacgacggccggggtctggtgcttcctggctacaagtacctcggacccttcaacggactcgacaagggggagcccgtcaacgcggcggacgcagcggccctcgagcacgacaaggcctacgaccagcagctgcaggcgggtgacaatccgtacctgcggtataaccacgccgacgccgagtttcaggagcgtctgcaagaagatacgtcttttgggggcaacctcgggcgagcagtcttccaggccaagaagcgggttctcgaacctctcggtctggttgaggaaggcgctaagacggctcctggaaagaagagaccggtagagccatcaccccagcgttctccagactcctctacgggcatcggcaagaaaggccaacagcccgccagaaaaagactcaattttggtcagactggcgactcagagtcagttccagaccctcaacctctcggagaacctccagcagcgccctctggtgtgggacctaatacaatggctgcaggcggtggcgcaccaatggcagacaataacgaaggcgccgacggagtgggtagttcctcgggaaattggcattgcgattccacatggctgggcgacagagtcatcaccaccagcacccgaacctgggccctgcccacctacaacaaccacctctacaagcaaatctccaacgggacatcgggaggagccaccaacgacaacacctacttcggctacagcaccccctgggggtattttgactttaacagattccactgccacttttcaccacgtgactggcagcgactcatcaacaacaactggggattccggcccaagagactcagcttcaagctcttcaacatccaggtcaaggaggtcacgcagaatgaaggcaccaagaccatcgccaataacctcaccagcaccatccaggtgtttacggactcggagtaccagctgccgtacgttctcggctctgcccaccagggctgcctgcctccgttcccggcggacgtgttcatgattccccagtacggctacctaacactcaacaacggtagtcaggccgtgggacgctcctccttctactgcctggaatactttccttcgcagatgctgagagccggcaacaacttccagtttacttacaccttcgaggacgtgcctttccacagcagctacgcccacagccagagcttggaccggctgatgaatcctctgattgaccagtacctgtactacttgtctcggactcaaacaacaggaggcacggcaaatacgcagactctgggcttcagccaaggtgggcctaatacaatggccaatcaggcaaagaactggctgccaggaccctgttaccgccaacaacgcgtctcaacgacaaccgggcaaaacaacaatagcaactttgcctggactgctgggaccaaataccatctgaatggaagaaattcattggctaatcctggcatcgctatggcaacacacaaagacgacgaggagcgtttttttcccagtaacgggatcctgatttttggcaaacaaaatgctgccagagacaatgcggattacagcgatgtcatgctcaccagcgaggaagaaatcaaaaccactaaccctgtggctacagaggaatacggtatcgtggcagataacttgcagcagcaaaacacggctcctcaaattggaactgtcgacagccagggggccttacccggtatggtctggcagaaccgggacgtgtacctgcagggtcccatctgggccaagattcctcacacggacggcaacttccacccgtctccgctgatgggcggctttggcctgaaacatcctccgcctcagatcctgatcaagaacacgcctgtacctgcggatcctccgaccaccttcaaccagtcaaagctgaactctttcatcacgcaatacagcaccggacaggtcagcgtggaagttgaatgggagctgcagaaggaaaacagcaagcgctggaaccccgagatccagtacacctccaactactacaaatctacaagtgtggactttgctgttaatacagaaggcgtgtactctgaaccccgccccattggcacccgttacctcacccgtaatctgtaa

SEQ ID NO: 12612 - DNA, 2217 bp, Artificial Sequence
  source: /note="Description of Artificial Sequence: Synthetic polynucleotide"
atggctgccgatggttatcttccagattggctcgaggacaacctctctgagggcattcgcgagtggtgggcgctgaaacctggagccccgaagcccaaagccaaccagcaaaagcaggacgacggccggggtctggtgcttcctggctacaagtacctcggacccttcaacggactcgacaagggggagcccgtcaacgcggcggacgcagcggccctcgagcacgacaaggcctacgaccagcagctgcaggcgggtgacaatccgtacctgcggtataaccacgccgacgccgagtttcaggagcgtctgcaagaagatacgtcttttgggggcagcctcgggcgagcagtcttccaggccaagaagcgggttctcgaacctctcggtctggttgaggaaggcgctaagacggctcctggaaagaagagaccggtagagccatcaccccagcgttctccagactcctctacgggcatcggcaagaaaggccaacagcccgccagaaaaagactcaattttggtcagactggcgactcagagtcagttccagaccctcaacctctcggagaacctccagcagcgccctctggtgtgggacctaatacaatggctgcaggcggtggcgcaccaatggcagacaataacgaaggcgccgacggagtgggtagttcctcgggaaattggcattgcgattccacatggctgggcgacagagtcatcaccaccagcacccgaacctgggccctgcccacctacaacaaccacctctacaagcaaatctccaacgggacatcgggaggagccaccaacgacaacacctacttcggctacagcaccccctgggggtattttgactttaacagattccactgccacttttcaccacgtgactggcagcgactcatcaacaacaactggggattccggcccaagagactcagcttcaagctcttcaacatccaggtcaaggaggtcacgcagaatgaaggcaccaagaccatcgccaataacctcaccagcaccatccaggtgtttacggactcggagtaccagctgccgtacgttctcggctctgcccaccagggctgcctgcctccgttcccggcggacgtgttcatgattccccagtacggctacctaacactcaacaacggtagtcaggccgtgggacgctcctccttctactgcctggaatactttccttcgcagatgctgagaaccggcaacaacttccagtttacttacaccttcgaggacgtgcctttccacagcagctacgcccacagccagagcttggaccggctgatgaatcctctgattgaccagtacctgtactacttgtctcggactcaaacaacaggaggcacggcaaatacgcagactctgggcttcagccaaggtgggcctaatacaatggccaatcaggcaaagaactggctgccaggaccctgttaccgccaacaacgcgtctcaacgacaaccgggcaaaacaacaatagcaactttgcctggactgctgggaccaaataccatctgaatggaagaaattcattggctaatcctggcatcgctatggcaacacacaaagacgacgaggagcgtttttttcccagtaacgggatcctgatttttggcaaacaaaatgctgccagagacaatgcggattacagcgatgtcatgctcaccagcgaggaagaaatcaaaaccactaaccctgtggctacagaggaatacggtatcgtggcagataacttgcagcagcaaaacacggctcctcaaattggaactgtcaacagccagggggccttacccggtatggtctggcagaaccgggacgtgtacctgcagggtcccatctgggccaagattcctcacacggacggcaacttccacccgtctccgctgatgggcggctttggcctgaaacatcctccgcctcagatcctgatcaagaacacgcctgtacctgcggatcctccgaccaccttcaaccagtcaaagctgaactctttcatcacgcaatacagcaccggacaggtcagcgtggaaattgaatgggagctgcagaaggaaaacagcaagcgctggaaccccgagatccagtacacctccaactactacaaatctacaagtgtggactttgctgttaatacagaaggcgtgtactctgaaccccgccccattggcacccgtcacctcacccgtaatctgtaa

SEQ ID NO: 12613 - DNA, 2217 bp, Artificial Sequence
  source: /note="Description of Artificial Sequence: Synthetic polynucleotide"
atggctgccgatggttatcttccagattggctcgaggacaacctctctgagggcattcgcgagtggtgggcgctgaaacctggagccccgaagcccaaagccaaccagcaaaagcaggacgacggccggggtctggtgcttcctggctacaagtacctcggacccttcaacggactcgacaagggggagcccgtcaacgcggcggacgcagcggccctcgagcacgacaaggcctacgaccagcagctgcaggcgggtgacaatccgtacctgcggtataaccacgccgacgccgagtttcaggagcgtctgcaagaagatacgtcttttgggggcaacctcgggcgagcagtcttccaggccaagaagcgggttctcgaacctctcggtctggttgaggaaggcgctaagacggctcctggaaagaagagaccggtagagccatcaccccagcgttctccagactcctctacgggcatcggcaagaaaggccaacagcccgccagaaaaagactcaattttggtcagactggcgactcagagtcagttccagaccctcaacctctcggagaacctccagcagcgccctctggtgtgggacctaatacaatggctgcaggcggtggcgcaccaatggcagacaataacgaaggcgccgacggagtgggtagttcctcgggaaattggcattgcgattccacatggctgggcgacagagtcatcaccaccagcacccgaacctgggccctgcccacctacaacaaccacctctacaagcaaatctccaacgggacatcgggaggagccaccaacgacaacacctacttcggctacagcaccccctgggggtattttgactttaacagattccactgccacttttcaccacgtgactggcagcgactcatcaacaacaactggggattccggcccaagagactcagcttcaagctcttcaacatccaggtcaaggaggtcacgcagaatgaaggcaccaagaccatcgccaataacctcaccagcaccatccaggtgtttacggactcggagtaccagctgccgtacgttctcggctctgcccaccagggctgcctgcctccgttcccggcggacgtgttcacgattccccagtacggctacctaacactcaacaacggtagtcaggccgtgggacgctcctccttctactgcctggaatactttccttcgcagatgctgagaaccggcaacaacttccagtttacttacaccttcgaggacgtgcctttccacagcagctacgcccacagccagagcttggaccggctgatgaatcctctgattgaccagtacctgtactacttgtctcggactcaaacaacaggaggcacggcaaatacgcagactctgggcttcagccaaggtgggcctaatacaatggccaatcaggcaaagaactggctgccaggaccctgttaccgccaacaacgcgtctcaacgacaaccgggcaaaacaacaatagcaactttgcctggactgctgggaccaaataccatctgaatggaagaaattcattggctaatcctggcatcgctatggtaacacacaaagacgacgaggagcgtttttttcccagtaacgggatcctgatttttggcaaacaaaatgctgccagagacaatgcggattacagcgatgtcatgctcaccagcgaggaagaaatcaaaaccactaaccctgtggctacagaggaatacggtatcgtggcagataacttgcagcagcaaaacacggctcctcaaattggaactgtcaacagccagggggccttacccggtatggtctggcagaaccgggacgtgtacctgcagggtcccatctgggccaagattcctcacacggacggcaacttccacccgtctccgctgatgggcggctttggcctgaaacatcctccgcctcagatcctgatcaagaacacgcctgtacctgcggatcctccgaccaccttcaaccagtcaaagctgaactctttcatcacgcaatacagcaccggacaggtcagcgtggaaattgaatgggagctgcagaaggaaaacagcaagcgctggaaccccgagatccagtacacctccaactactacaaatctacaagtgtggactttgctgttaatacagaaggcgtgtactctgaaccccgccccattggcacccgttacctcacccgtaatctgtaa

SEQ ID NO: 12614 - protein, 734 aa, Artificial Sequence
  source: /note="Description of Artificial Sequence: Synthetic polypeptide"
MAADGYLPDWLEDTLSEGIRQWWKLKPGPPPPKPAERHKDDSRGLVLPGYKYLGPFNGLDKGEPVNEADAAALEHDKAYDRQLDSGDNPYLKYNHADAEFQERLKEDTSFGGNLGRAVFQAKKRVLEPLGLVEEPVKTAPGKKRPVEHSPVEPDSSSGTGKAGQQPARKRLNFGQTGDADSVPDPQPLGQPPAAPSGLGTNTMATGSGAPMADNNEGADGVGNSSGNWHCDSTWMGDRVITTSTRTWALPTYNNHLYKQISSQSGASNDNHYFGYSTPWGYFDFNRFHCHFSPRDWQRLINNNWGFRPKRLNFKLFNIQVKEVTQNDGTTTIANNLTSTVQVFTDSEYQLPYVLGSAHQGCLPPFPADVFMVPQYGYLTLNNGSQAVGRSSFYCLEYFPSQMLRTGNNFTFSYTFEDVPFHSSYAHSQSLDRLMNPLIDQYLYYLSRTHSNSGTHQQSRLQFSQAGASMSGPARNWLPGPCYRQQRVSKQSADNNNSEYSWTGATKYHLNGRDSLVNPGPAMASHKDDEEKFFLMSGVLIFGKQGSDENNVDIEKVMITDEEEIRTTNPVATEQYGSVSTNLQEAKTSPATADVNHQGVLPGMVWQDRDVYLQGPIWAKIPHTDGHFHPSPLMGGFGLKHPPPQILIKNTPVPANPSTTFSAAKFASFITQYSTGQASVEIEWELQKENSKRWNPEIQYTSNYNKSVNVDFTVDTNGVYSEPRPIGTRYLTRNL

SEQ ID NO: 12615 - protein, 734 aa, Artificial Sequence
  source: /note="Description of Artificial Sequence: Synthetic polypeptide"
MAADGYLPDWLEDTLSEGIRQWWKLKPGPPPPKPAERHKDDSRGLVLPGYKYLGPFNGLDKGEPVNEADAAALEHDKAYDRQLDSGDNPYLKYNHADAEFQERLKEDTSFGGNLGRAVFQAKKRVLEPLGLVEEPVKTAPGKKRPVEHSPVEPDSSSGTGKAGQQPARKRLNFGQTGDADSVPDPQPLGQPPAAPTSLGSTTMATGSGAPMADNNEGADGVGNSSGNWHCDSQWLGDRVITTSTRTWALPTYNNHLYKQISSQSGASNDNHYFGHSTPWGYFDFNRFHCHFSPRDWQRLINNNWGFRPKRLNFKLFNIQVKEVTQNDGTTTIANNLTSTVQVFTDSEYQLPYVLGSAHQGCLPPFPADVFMVPQYGYLTLNNGSQAVGRSSFYCLEYFPSQMLRTGNNFTFSYTFEDVPFHSSYAHSQSLDRLMNPLIDQYLYYLSRTHSNSGTHQQSRLQFSQAGASMSGPARNWLPGPCYRQQRVSKQSADNNNSEYSWTGATKYRLNGRDSLVNPGSAMASHKDDEEKFFLMSGVLIFGKQGSDENNVDIEKVMITDEEEIRTTNPVATEQYGSVSTNLQEAKTSPATADVNHQGVLPGMVWQDRDVYLQGPIWAKIPHTDGHFHPSPLMGGFGLKHPPPQILIKNTPVPANPSTTFSAAKFASFITQYSTGQVSVEIEWELQKENSKRWNPEIQYTSNYNKSVNVDFTVDTNGVYSEPRPIGTRYLTRNL

SEQ ID NO: 12616 - protein, 734 aa, Artificial Sequence
  source: /note="Description of Artificial Sequence: Synthetic polypeptide"
MAADGYLPDWLEDTLSEGIRQWWKLKPGPPPPKPAERHKDDSRGLVLPGYKYLGPFNGLDKGEPVNEADAAALEHDKAYDRQLDSGDNPYLKYNHADAEFQERLKEDTSFGGNLGRAVFQAKKRVLEPLGLVEEPVKTAPGKKRPVEHSPVEPDSSSGTGKAGQQPARKRLNFGQTGDADSVPDPQPLGQPPAAPSGLGTNTMATGSGAPMADNNEGADGVGNSSGNWHCDSTWMGDRVITTSTRTWALPTYNNHLYKQISSQSGASNDNHYFGYSTPWGYFDFNRFHCHFSPRDWQRLINNNWGFRPKRLNFKLFNIQVKEVTQNDGTTTIANNLTSTVQVFTDSEYQLPYVLGSAHQGCLPPFPADVFMVPQYGYLTLNNGSQAVGRSSFYCLEYFPSQMLRTGNNFTFSYTFEDVPFHSSYAHSQSLDRLMNPLIDQYLYYLSRTHSNSGTHQQSRLQFSQAGASMSGPARNWLPGPCYRQQRVSKQSADNNNSEYSWTGATKYRLNGRDSLVNPGSAMASHKDDEEKFFLMSGVLIFGKQGSDENNVDIEKVMITDEEEIRTTNPVATEQYGSVSTNLQEAKTSPATADVNHQGVLPGMVWQDRDVYLQGPIWAKIPHTDGHFHPSPLMGGFGLKHPPPQILIKNTPVPANPSTTFSAAKFASFITQYSTGQVSVEIEWELQKENSKRWNPEIQYTSNYNKSVNVDFTVDTNGVYSEPRPIGTRYLTRNL

SEQ ID NO: 12617 - protein, 734 aa, Artificial Sequence
  source: /note="Description of Artificial Sequence: Synthetic polypeptide"
MAADGYLPDWLEDTLSEGIRQWWKLKPGPPPPKPAERHKDDSRGLVLPGYKYLGPFNGLDKGEPVNEADAAALEHDKAYDRQLDSGDNPYLKYNHADAEFQERLKEDTSFGGNLGRAVFQAKKRVLEPLGLVEEPVKTAPGKKRPVEHSPVEPDSSSGTGKAGQQPARKRLNFGQTGDADSVPDPQPLGQPPAAPTSLGSTTMATGSGAPMADNNEGADGVGNSSGNWHCDSQWLGDRVITTSTRTWALPTYNNHLYKQISSQSGASNDNHYFGHSTPWGYFDFNRFHCHFSPRDWQRLINNNWGFRPKRLNFKLFNIQVKEVTQNDGTTTIANNLTSTVQVFTDSEYQLPYVLGSAHQGCLPPFPADVFMVPQYGYLTLNNGSQAVGRSSFYCLEYFPSQMLRTGNNFTFSYTFEDVPFHSSYAHSQSLDRLMNPLIDQYLYYLSRTHSNSGTHQQSRLQFSQAGASMSGPARNWLPGPCYRQQRVSKQSADNNNSEYSWTGATKYHLNGRDSLVNPGPAMASHKDDEEKFFLMSGVLIFGKQGSDENNVDIEKVMITDEEEIRTTNPVATEQYGSVSTNLQEAKTSPATADVNHQGVLPGMVWQDRDVYLQGPIWAKIPHTDGHFHPSPLMGGFGLKHPPPQILIKNTPVPANPSTTFSAAKFASFITQYSTGQASVEIEWELQKENSKRWNPEIQYTSNYNKSVNVDFTVDTNGVYSEPRPIGTRYLTRNL

SEQ ID NO: 12618 - protein, 734 aa, Artificial Sequence
  source: /note="Description of Artificial Sequence: Synthetic polypeptide"
MAADGYLPDWLEDTLSEGIRQWWKLKPGPPPPKPAERHKDDSRGLVLPGYKYLGPFNGLDKGEPVNEADAAALEHDKAYDRQLDSGDNPYLKYNHADAEFQERLKEDTSFGGNLGRAVFQAKKRVLEPLGLVEEPVKTAPGKKRPVEHSPVEPDSSSGTGKAGQQPARKRLNFGQTGDADSVPDPQPLGQPPAAPTSLGSTTMATGSGAPMADNNEGADGVGNSSGNWHCDSQWLGDRVITTSTRTWALPTYNNHLYKQISSQSGASNDNHYFGYSTPWGYFDFNRFHCHFSPRDWQRLINNNWGFRPKRLNFKLFNIQVKEVTQNDGTTTIANNLTSTVQVFTDSEYQLPYVLGSAHQGCLPPFPADVFMVPQYGYLTLNNGSQAVGRSSFYCLEYFPSQMLRTGNNFTFSYTFEDVPFHSSYAHSQSLDRLMNPLIDQYLYYLSRTHSNSGTHQQSRLQFSQAGASMSGPARNWLPGPCYRQQRVSKQSADNNNSEYSWTGATKYRLNGRDSLVNPGSAMASHKDDEEKFFLMSGVLIFGKQGSDENNVDIEKVMITDEEEIRTTNPVATEQYGSVSTNLQEAKTSPATADVNHQGVLPGMVWQDRDVYLQGPIWAKIPHTDGHFHPSPLMGGFGLKHPPPQILIKNTPVPANPSTTFSAAKFASFITQYSTGQVSVEIEWELQKENSKRWNPEIQYTSNYNKSVNVDFTVDTNGVYSEPRPIGTRYLTRNL

SEQ ID NO: 12619 - protein, 734 aa, Artificial Sequence
  source: /note="Description of Artificial Sequence: Synthetic polypeptide"
MAADGYLPDWLEDTLSEGIRQWWKLKPGPPPPKPAERHKDDSRGLVLPGYKYLGPFNGLDKGEPVNEADAAALEHDKAYDRQLDSGDNPYLKYNHADAEFQERLKEDTSFGGNLGRAVFQAKKRVLEPLGLVEEPVKTAPGKKRPVEHSPVEPDSSSGTGKAGQQPARKRLNFGQTGDADSVPDPQPLGQPPAAPSGLGTNTMATGSGAPMADNNEGADGVGNSSGNWHCDSTWMGDRVITTSTRTWALPTYNNHLYKQISSQSGASNDNHYFGYSTPWGYFDFNRFHCHFSPRDWQRLINNNWGFRPKRLNFKLFNIQVKEVTQNDGTTTIANNLTSTVQVFTDSEYQLPYVLGSAHQGCLPPFPADVFMVPQYGYLTLNNGSQAVGRSSFYCLEYFPSQMLRTGNNFTFSYTFEDVPFHSSYAHSQSLDRLMNPLIDQYLYYLSRTHSNSGTHQQSRLQFSQAGASMSGPARNWLPGPCYRQQRVSKQSADNNNSEYSWTGATKYRLNGRDSLVNPGSAMASHKDDEEKFFLMSGVLIFGKQGSDENNVDIEKVMITDEEEIRTTNPVATEQYGSVSTNLQEAKTSPATADVNHQGVLPGMVWQDRDVYLQGPIWAKIPHTDGHFHPSPLMGGFGLKHPPPQILIKNTPVPANPSTTFSAAKFASFITQYSTGQASVEIEWELQKENSKRWNPEIQYTSNYNKSVNVDFTVDTNGVYSEPRPIGTRYLTRNL

SEQ ID NO: 12620 - protein, 734 aa, Artificial Sequence
  source: /note="Description of Artificial Sequence: Synthetic polypeptide"
MAADGYLPDWLEDTLSEGIRQWWKLKPGPPPPKPAERHKDDSRGLVLPGYKYLGPFNGLDKGEPVNEADAAALEHDKAYDRQLDSGDNPYLKYNHADAEFQERLKEDTSFGGNLGRAVFQAKKRVLEPLGLVEEPVKTAPGKKRPVEHSPVEPDSSSGTGKAGQQPARKRLNFGQTGDADSVPDPQPLGQPPAAPTSLGSTTMATGSGAPMADNNEGADGVGNSSGNWHCDSTWMGDRVITTSTRTWALPTYNNHLYKQISSQSGASNDNHYFGYSTPWGYFDFNRFHCHFSPRDWQRLINNNWGFRPKRLNFKLFNIQVKEVTQNDGTTTIANNLTSTVQVFTDSEYQLPYVLGSAHQGCLPPFPADVFMVPQYGYLTLNNGSQAVGRSSFYCLEYFPSQMLRTGNNFTFSYTFEDVPFHSSYAHSQSLDRLMNPLIDQYLYYLSRTHSNSGTHQQSRLQFSQAGASMSGPARNWLPGPCYRQQRVSKQSADNNNSEYSWTGATKYRLNGRDSLVNPGSAMASHKDDEEKFFLMSGVLIFGKQGSDENNVDIEKVMITDEEEIRTTNPVATEQYGSVSTNLQEAKTSPATADVNHQGVLPGMVWQDRDVYLQGPIWAKIPHTDGHFHPSPLMGGFGLKHPPPQILIKNTPVPANPSTTFSAAKFASFITQYSTGQVSVEIEWELQKENSKRWNPEIQYTSNYNKSVNVDFTVDTNGVYSEPRPIGTRYLTRNL

SEQ ID NO: 12621 - protein, 734 aa, Artificial Sequence
  source: /note="Description of Artificial Sequence: Synthetic polypeptide"
MAADGYLPDWLEDTLSEGIRQWWKLKPGPPPPKPAERHKDDSRGLVLPGYKYLGPFNGLDKGEPVNEADAAALEHDKAYDRQLDSGDNPYLKYNHADAEFQERLKEDTSFGGNLGRAVFQAKKRVLEPLGLVEEPVKTAPGKKRPVEHSPVEPDSSSGTGKAGQQPARKRLNFGQTGDADSVPDPQPLGQPPAAPSGLGTNTMATGSGAPMADNNEGADGVGNSSGNWHCDSTWMGDRVITTSTRTWALPTYNNHLYKQISSQSGASNDNHYFGYSTPWGYFDFNRFHCHFSPRDWQRLINNNWGFRPKRLNFKLFNIQVKEVTQNGGTTTIANNLTSTVQVFTDSEYQLPYVLGSAHQGCLPPFPADVFMVPQYGYLTLNNGSQAVGRSSFYCLEYFPSQMLRTGNNFTFSYTFEDVPFHSSYAHSQSLDRLMNPLIDQYLYYLSRTHSNSGTHQQSRLQFSQAGASMSGPARNWLPGPCYRQQRVSKQSADNNNSEYSWTGATKYRLNGRDSLVNPGSAMASHKDDEEKFFLMSGVLIFGKQGSDENNVDIEKVMITDEEEIRTTNPVATEQYGSVSTNLQEAKTSPATADVNHQGVLPGMVWQDRDVYLQGPIWAKIPHTDGHFHPSPLMGGFGLKHPPPQILIKNTPVPANPSTTFSAAKFASFITQYSTGQVSVEIEWELQKENSKRWNPEIQYTSNYNKSVNVDFTVDTNGVYSEPRPIGTRYLTRNL

SEQ ID NO: 12622 - protein, 735 aa, Artificial Sequence
  source: /note="Description of Artificial Sequence: Synthetic polypeptide"
MAADGYLPDWLEDTLSEGIRQWWKLKPGPPPPKPAERHKDDSRGLVLPGYKYLGPFNGLDKGEPVNEADAAALEHDKAYDRQLDSGDNPYLKYNHADAEFQERLKEDTSFGGNLGRAVFQAKKRVLEPLGLVEEPVKTAPGKKRPVEHSPVEPDSSSGTGKAGQQPARKRLNFGQTGDADSVPDPQPLGQPPAAPSGLGTNTMATGSGAPMADNNEGADGVGNSSGNWHCDSTWMGDRVITTSTRTWALPTYNNHLYKQISSQSGASNDNHYFGYSTPWGYFDFNRFHCHFSPRDWQRLINNNWGFRPKRLNFKLFNIQVKEVTQNDGTTTIANNLTSTVQVFTDSEYQLPYVLGSAHQGCLPPFPADVFMVPQYGYLTLNNGSQAVGRSSFYCLEYFPSQMLRTGNNFTFSYTFEDVPFHSSYAHSQSLDRLMNPLIDQYLYYLSRTNTPSGTTTQSRLQFSQAGASDIRDQSRNWLPGPCYRQQRVSKTSADNNNSEYSWTGATKYHLNGRDSLVNPGPAMASHKDDEEKFFPQSGILIFGKQGSEKTNVDIEKVMITDEEEIRTTNPVATEQYGSVSTNLQRGNRQAATADVNTQGVLPGMVWQDRDVYLQGPIWAKIPHTDGHFHPSPLMGGFGLKHPPPQILIKNTPVPANPSTTFSAAKFASFITQYSTGQVSVEIEWELQKENSKRWNPEIQYTSNYNKSVNVDFTVDTNGVYSEPRPIGTRYLTRNL

SEQ ID NO: 12623 - protein, 735 aa, Artificial Sequence
  source: /note="Description of Artificial Sequence: Synthetic polypeptide"
MAADGYLPDWLEDTLSEGIRQWWKLKPGPPPPKPAERHKDDSRGLVLPGYKYLGPFNGLDKGEPVNEADAAALEHDKAYDRQLDSGDNPYLKYNHADAEFQERLKEDTSFGGNLGRAVFQAKKRVLEPLGLVEEPVKTAPGKKRPVEHSPVEPDSSSGTGKAGQQPARKRLNFGQTGDADSVPDPQPLGQPPAAPSGLGTNTMATGSGAPMADNNEGADGVGNSSGNWHCDSTWMGDRVITTSTRTWALPTYNNHLYKQISSQSGASNDNHYFGYSTPWGYFDFNRFHCHFSPRDWQRLINNNWGFRPKRLNFKLFNIQVKEVTQNDGTTTIANNLTSTVQVFTDSEYQLPYVLGSAHQGCLPPFPADVFMVPQYGYLTLNNGSQAVGRSSFYCLEYFPSQMLRTGNNFTFSYTFEDVPFHSSYARSQSLDRLMNPLIDQYLYYLSRTNTPSGTTTQSRLQFSQAGASDIRDQSRNWLPGPCYRQQRVSKTSADNNNSEYSWTGATKYHLNGRDSLVNPGPAMASHKDDEEKFFPQSGVLIFGKQGSEKTNVDIEKVMITDEEEIRTTNPVATEQYGSVSTNLQRGNRQAATADVNTQGVLPGMVWQDRDVYLQGPIWAKIPHTDGHFHPSPLMGGFGLKHPPPQILIKNTPVPANPSTTFSAAKFASFITQYSTGQVSVEIEWELQKENSKRWNPEIQYTSNYNKSVNVDFTVDTNGVYSEPRPIGTRYLTRNL

SEQ ID NO: 12624 - protein, 735 aa, Artificial Sequence
  source: /note="Description of Artificial Sequence: Synthetic polypeptide"
MAADGYLPDWLEDTLSEGIRQWWKLKPGPPPPKPAERHKDDSRGLVLPGYKYLGPFNGLDKGEPVNEADAAALEHDKAYDRQLDSGDNPYLKYNHADAEFQERLKEDTSFGGNLGRAVFQAKKRVLEPLGLVEEPVKTAPGKKRPVEHSPVEPDSSSGTGKAGQQPARKRLNFGQTGDADSVPDPQPLGQPPAAPSGLGTNTMATGSGAPMADNNEGADGVGNSSGNWHCDSTWMGDRVITTSTRTWALPTYNNHLYKQISSQSGASNDNHYFGYSTPWGYFDFNRFHCHFSPRDWQRLINNNWGFRPKRLNFKLFNIQVKEVTQNDGTTTIANNLTSTVQVFTDSEYQLPYVLGSAHQGCLPPFPADVFMVPQYGYLTLNNGSQAVGRSSFYCLEYFPSQMLRTGNNFTFSYTFEDVPFHSSYAHSQSLDRLMNPLIDQYLYYLSRTNTPSGTTTQSRLQFSQAGASDIRDQSRNWLPGPCYRQQRVSKTSADNNNSEYSWTGVTKYHLNGRDSLVNPGPAMASHKDDEEKFFPQSGVLIFGKQGSEKTNVDIEKVMITDEEEIRTTNPVATEQYGSVSTNLQRGNRQAATADVNTQGVLPGMVWQDRDVYLQGPIWAKIPHTDGHFHPSPLMGGFGLKHPPPQILIKNTPVPANPSTTFSAAKFASFITQYSTGQVSVEIEWELQKENSKRWNPEIQYTSNYNKSVNVDFTVDTNGVYSEPRPIGTRYLTRNL

SEQ ID NO: 12625 - protein, 735 aa, Artificial Sequence
  source: /note="Description of Artificial Sequence: Synthetic polypeptide"
MAADGYLPDWLEDTLSEGIRQWWKLKPGPPPPKPAERHKDDSRGLVLPGYKYLGPFNGLDKGEPVNEADAAALEHDKAYDRQLDSGDNPYPKYNHADAEFQERLKEDTSFGGNLGRAVFQAKKRVLEPLGLVEEPVKTAPGKKRPVEHSPVEPDSSSGTGKAGQQPARKRLNFGQTGDADSVPDPQPLGQPPAAPSGLGTNTMATGSGAPMADNNEGADGVGNSSGNWHCDSTWMGDRVITTSTRTWALPTYNNHLYKQISSQSGASNDNHYFGYSTPWGYFDFNRFHCHFSPRDWQRLINNNWGFRPKRLNFKLFNIQVKEVTQNDGTTTIANNLTSTVQVFTDSEYQLPYVLGSAHQGCLPPFPADVFMVPQYGYLTLNNGSQAVGRSSFYCLEYFPSQMLRTGNNFTFSYTFEDVPFHSSYAHSQSLDRLMNPLIDQYLYYLSRTNTPSGTTTQSRLQFSQAGASDIRDQSRNWLPGPCYRQQRVSKTSADNNNSEYSWTGATKYHLNGRDSLVNPGPAMASHKDDEEKFFPQSGVLIFGKQGSEKTNVDIEKVMITDEEEIRTTNPVATEQYGSVSTNLQRGNRQAATADVNTQGVLPGMVWQDRDVYLQGPIWAKIPHTDGHFHPSPLMGGFGLKHPPPQILIKNTPVPANPSTTFSAAKFASFITQYSTGQVSVEIEWELQKENSKRWNPEIQYTSNYNKSVNVDFTVDTNGVYSEPRPIGTRYLTRNL

SEQ ID NO: 12626 - protein, 735 aa, Artificial Sequence
  source: /note="Description of Artificial Sequence: Synthetic polypeptide"
MAADGYLPDWLEDTLSEGIRQWWKLKPGPPPPKPAERHKDDSRGLVLPGYKYLGPFNGLDKGEPVNEADAAALEHDKAYDRQLDSGDNPYLKYNHADAEFQERLKEDTSFGGNLGRAVFQAKKRVLEPLGLVEEPVKTAPGKKRPVEHSPVEPDSSSGTGKAGQQPARKRLNFGQTGDADSVPDPQPLGQPPAAPSGLGTNTMATGSGAPMADNNEGADGVGNSSGNWHCDSTWMGDRVITTSTRTWALPTYNNHLYKQISSQSGASNDNHYFGYSTPWGYFDFNRFHCHFSPRDWQRLINNNWGFRPKRLNFKLFNIQVKEVTQNDGTTTIANNLTSTVQVFTDSEYQLPYVLGSAHQGCLPPFPADVFMVPQYGYLTLNNGSQAVGRSSFYCLEYFPSQMLRTGNNFTFSYTFEDVPFHSSYAHSQSLDRLMNPLIDQYLYYLSRTNTPSGTTTQSRLQFSQAGASDIRDQSRNWLPGPCYRQQRVSKTSADNNNSEYSWTGATKYHLNGRDSLVNPGPAMASHKDDEEKFFPQSGVPIFGKQGSEKTNVDIEKVMITDEEEIRTTNPVATEQYGSVSTNLQRGNRQAATADVNTQGVLPGMVWQDRDVYLQGPIWAKIPHTDGHFHPSPLMGGFGLKHPPPQILIKNTPVPANPSTTFSAAKFASFITQYSTGQVSVEIEWELQKENSKRWNPEIQYTSNYNKSVNVDFTVDTNGVYSEPRPIGTRYLTRNL

SEQ ID NO: 12627 - protein, 735 aa, Artificial Sequence
  source: /note="Description of Artificial Sequence: Synthetic polypeptide"
MAADGYLPDWLEDTLSEGIRQWWKLKPGPPPPKPAERHKDDSRGLVLPGYKYLGPFNGLDKGEPVNEADAAALEHDKAYDRQLDSGDNPYLKYNHADAEFQERLKEDTSFGGNLGRAVFQAKKRVLEPLGLVEEPVKTAPGKKRPVEHSPVEPDSSSGTGKAGQQPARKRLNFGQTGDADSVPDPQPLGQPPAAPSGLGTNTMATGSGAPMADNNEGADGVGNSSGNWHCDSTWMGDRVITTSTRTWALPTYNNHLYKQISSQSGASNDNHYFGYSTPWGYFDFNRFHCHFSPRDWQRLINNNWGFRPRRLNFKLFNIQVKEVTQNDGTTTIANNLTSTVQVFTDSEYQLPYVLGSAHQGCLPPFPADVFMVPQYGYLTLNNGSQAVGRSSFYCLEYFPSQMLRTGNNFTFSYTFEDVPFHSSYAHSQSLDRLMNPLIDQYLYYLSRTNTPSGTTTQSRLQFSQAGASDIRDQSRNWLPGPCYRQQRVSKTSADNNNSEYSWTGATKYHLNGRDSLVNPGPAMASHKDDEEKFFPQSGVLIFGKQGSEKTNVDIEKVMITDEEEIRTTNPVATEQYGSVSTNLQRGNRQAATADVNTQGVLPGMVWQDRDVYLQGPIWAKIPHTDGHFHPSPLMGGFGLKHPPPQILIKNTPVPANPSTTFSAAKFASFITQYSTGQVSVEIEWELQKENSKRWNPEIQYTSNYNKSVNVDFTVDTNGVYSEPRPIGTRYLTRNL

SEQ ID NO: 12628 - protein, 735 aa, Artificial Sequence
  source: /note="Description of Artificial Sequence: Synthetic polypeptide"
MAADGYLPDWLEDTLSEGIRQWWKLKPGPPPPKPAERHKDDSRGLVLPGYKYLGPFNGLDKGEPVNEADAAALEHDKAYDRQLDSGDNPYLKYNHADAEFQERLKEDTSFGGNLGRAVFQAKKRVLEPLGLVEEPVKTAPGKKRPVEHSPVEPDSSSGTGKAGQQPARKRLNFGQTGDADSVPDPQPLGQPPAAPPGLGTNTMATGSGAPMADNNEGADGVGNSSGNWHCDSTWMGDRVITTSTRTWALPTYNNHLYKQISSQSGASNDNHYFGYSTPWGYFDFNRFHCHFSPRDWQRLINNNWGFRPKRLNFKLFNIQVKEVTQNDGTTTIANNLTSTVQVFTDSEYQLPYVLGSAHQGCLPPFPADVFMVPQYGYLTLNNGSQAVGRSSFYCLEYFPSQMLRTGNNFTFSYTFEDVPFHSSYAHSQSLDRLMNPLIDQYLYYLSRTNTPSGTTTQSRLQFSQAGASDIRDQSRNWLPGPCYRQQRVSKTSADNNNSEYSWTGATKYHLNGRDSLVNPGPAMASHKDDEEKFFPQSGVLIFGKQGSEKTNVDIEKVMITDEEEIRTTNPVATEQYGSVSTNLQRGNRQAATADVNTQGVLPGMVWQDRDVYLQGPIWAKIPHTDGHFHPSPLMGGFGLKHPPPQILIKNTPVPANPSTTFSAAKFASFITQYSTGQVSVEIEWELQKENSKRWNPEIQYTSNYNKSVNVDFTVDTNGVYSEPRPIGTRYLTRNL

SEQ ID NO: 12629 - protein, 735 aa, Artificial Sequence
  source: /note="Description of Artificial Sequence: Synthetic polypeptide"
MAADGYLPDWLEDTLSEGIRQWWKLKPGPPPPKPAERHKDDSRGLVLPGYKYLGPFNGLDKGEPVNEADAAALEHDKAYDRQLDSGDNPYLKYNHADAEFQERLKEDTSFGGNLGRAVFQAKKRVLEPLGLVEEPVKTAPGKKRPVEHSPVEPDSSSGTGKAGQQPARKRLNFGQTGDADSVPDPQPLGQPPAAPSGLGTNTMATGSGAPMADNNEGADGVGNSSGNWHCDSTWMGDRVITTSTRTWALPTYNNHLYKQISSQSGASNDNHYFGYSTPWGYFDFNRFHCHFSPRDWQRLINNNWGFRPKRLNFKLFNIQVKEVTQNDGTTTIANNLTSTVQVFTDSEYQLPYVLGSAHQGCLPPFPADVFMVPQYGYLTLNNGSQAVGRSSFYCLEYFPSQMLRTGNNFTFSYTFEDVPFHSSYAHSQSLDRLMNPLIDQYLYYLSRTNTPSGTTTQSRLQFSQAGASDIRDQSRNWLPGPCYRQQRVSKTSADNNNSEYSWTGATKYHLNGRDSLVNPGPAMASHKDDEEKFFPQSGVLIFGKQGSEKTNVDIEKVMITDEEEIRTTNPVATEQYGSVSTNLQRGNRQAATADVNTQGVLPGMVWQDRDVYLQGPIWAKIPHTDGHFHPSPLMGGFGLKHPPPQILIKNTPVPANPSTTFSAAKFASFITQYSTGQVSVEIEWELQKENSKRWNPEIQCTSNYNKSVNVDFTVDTNGVYSEPRPIGTRYLTRNL

SEQ ID NO: 12630 - protein, 735 aa, Artificial Sequence
  source: /note="Description of Artificial Sequence: Synthetic polypeptide"
MAADGYLPDWLEDTLSEGIRQWWKLKPGPPPPKPAERHKDDSRGLVLPGYKYLGPFNGLDKGEPVNEADAAALEHDKAYDRQLDSGDNPYLKYNHADAEFQERLKEDTSFGGNLGRAVFQAKKRVLEPLGLVEEPVKTAPGKKRPVEHSPVEPDSSSGTGKAGQQPARKRLNFGQTGDADSVPDPQPLGQPPAAPSGLGTNTMATGSGAPMADNNEGADGVGNSSGNWHCDSTWMGDRVITTSTRTWALPTYNNHLYKQISSQSGASNDNHYFGYSTPWGYFDFNRFHCHFSPRDWQRLINNNWGFRPKRLNFKLFNIQVKEVTQNDGTTTIANNLTSTVQVFTDSEYQLPYVLGSAHQGCLPPFPADVFMVPQYGYLTLNNGSQAVGRSSFYCLEYFPSQMLRTGNNFTFSYTFEDVPFHSSYAHSQSLDRLMNPLIDQYLYYLSRTNTPSGTTTQSRLQFSQAGASDIRDQSRNWLPGPCYRQQRVSKTSADNNNSEYSWTGATKYHLNGRDSLVNPGPAMASHKDDEEKFFPQSGVLIFGKQGSEKTNVDIEKVMITDEEEIRTTNPVATEQYGSVSTNLQRGNRQAATADVNTQGVLPGMVWQDRDVYLQGPIWAKIPHTDGHFHPSPLMGGFGLKHPPPQILIKNTPVPANPSTTFSAAKFASFITRYSTGQVSVEIEWELQKENSKRWNPEIQYTSNYNKSVNVDFTVDTNGVYSEPRPIGTRYLTRNL

SEQ ID NO: 12631 - protein, 735 aa, Artificial Sequence
  source: /note="Description of Artificial Sequence: Synthetic polypeptide"
MAADGYLPDWLEDTLSEGIRQWWKLKPGPPPPKPAERHKDDSRGLVLPGYKYLGPFNGLDKGEPVNEADAAALEHDKAYDRQLDSGDNPYLKYNHADAEFRERLKEDTSFGGNLGRAVFQAKKRVLEPLGLVEEPVKTAPGKKRPVEHSPVEPDSSSGTGKAGQQPARKRLNFGQTGDADSVPDPQPLGQPPAAPSGLGTNTMATGSGAPMADNNEGADGVGNSSGNWHCDSTWMGDRVITTSTRTWALPTYNNHLYKQISSQSGASNDNHYFGYSTPWGYFDFNRFHCHFSPRDWQRLINNNWGFRPKRLNFKLFNIQVKEVTQNDGTTTIANNLTSTVQVFTDSEYQLPYVLGSAHQGCLPPFPADVFMVPQYGYLTLNNGSQAVGRSSFYCLEYFPSQMLRTGNNFTFSYTFEDVPFHSSYAHSQSLDRLMNPLIDQYLYYLSRTNTPSGTTTQSRLQFSQAGASDIRDQSRNWLPGPCYRQQRVSKTSADNNNSEYSWTGATKYHLNGRDSLVNPGPAMASHKDDEEKFFPQSGVLIFGKQGSEKTNVDIEKVMITDEEEIRTTNPVATEQYGSVSTNLQRGNRQAATADVNTQGVLPGMVWQDRDVYLQGPIWAKIPHTDGHFHPSPLMGGFGLKHPPPQILIKNTPVPANPSTTFSAAKFASFITQYSTGQVSVEIEWELQKENSKRWNPEIQYTSNYNKSVNVDFTVDTNGVYSEPRPIGTRYLTRNL

SEQ ID NO: 12632 - protein, 735 aa, Artificial Sequence
  source: /note="Description of Artificial Sequence: Synthetic polypeptide"
MAADGYLPDWLEDTLSEGIRQWWKLKPGPPPPKPAERHKDDSRGLVLPGYKYLGPFNGLDKGEPVNEADAAALEHDKAYDRQLDSGDNPYLKHNHADAEFQERLKEDTSFGGNLGRAVFQAKKRVLEPLGLVEEPVKTAPGKKRPVEHSPVEPDSSSGTGKAGQQPARKRLNFGQTGDADSVPDPQPLGQPPAAPSGLGTNTMATGSGAPMADNNEGADGVGNSSGNWHCDSTWMGDRVITTSTRTWALPTYNNHLYKQISSQSGASNDNHYFGYSTPWGYFDFNRFHCHFSPRDWQRLINNNWGFRPKRLNFKLFNIQVKEVTQNDGTTTIANNLTSTVQVFTDSEYQLPYVLGSAHQGCLPPFPADVFMVPQYGYLTLNNGSQAVGRSSFYCLEYFPSQMLRTGNNFTFSYTFEDVPFHSSYAHSQSLDRLMNPLIDQYLYYLSRTNTPSGTTTQSRLQFSQAGASDIRDQSRNWLPGPCYRQQRVSKTSADNNNSEYSWTGATKYHLNGRDSLVNPGPAMASHKDDEEKFFPQSGVLIFGKQGSEKTNVDIEKVMITDEEEIRTTNPVATEQYGSVSTNLQRGNRQAATADVNTQGVLPGMVWQDRDVYLQGPIWAKIPHTDGHFHPSPLMGGFGLKHPPPQILIKNTPVPANPSTTFSAAKFASFITQYSTGQVSVEIEWELQKENSKRWNPEIQYTSNYNKSVNVDFTVDTNGVYSEPRPIGTRYLTRNL

SEQ ID NO: 12633 - protein, 735 aa, Artificial Sequence
  source: /note="Description of Artificial Sequence: Synthetic polypeptide"
MAADGYLPDWLEDTLSEGIRQWWKLKPGPPPPKPAERHKDDSRGLVLPGYKYLGPFNGLDKGEPVNEADAAALEHDKAYDRQLDSGDNPYLKYNHADAEFQERLKEDTSFGGNLGRAVFQAKKRVLEPLGLVEEPVKTAPGKKRPVEHSPVEPDSSSGTGKAGQQPARKRLNFGQTGDADSVPDPQPLGQPPAAPSGLGTNTMATGSGAPMADNNEGADGVGNSSGNWHCDSTWMGDRVITTSTRTWALPTYNNHLYKQISSQSGASNDNHYFGYSTPWGYFDFNRFHCHFSPRDWQRLINNNWGFRPKRLNFKLFNIQVKEVTQNDGTTTIANNLTSTVQVFTDSEYQLPYVLGSAHQGCLPPFPADVFMVPQYGYLTLNNGSRAVGRSSFYCLEYFPSQMLRTGNNFTFSYTFEDVPFHSSYAHSQSLDRLMNPLIDQYLYYLSRTNTPSGTTTQSRLQFSQAGASDIRDQSRNWLPGPCYRQQRVSKTSADNNNSEYSWTGATKYHLNGRDSLVNPGPAMASHKDDEEKFFPQSGVLIFGKQGSEKTNVDIEKVMITDEEEIRTTNPVATEQYGSVSTNLQRGNRQAATADVNTQGVLPGMVWQDRDVYLQGPIWAKIPHTDGHFHPSPLMGGFGLKHPPPQILIKNTPVPANPSTTFSAAKFASFITQYSTGQVSVEIEWELQKENSKRWNPEIQYTSNYNKSVNVDFTVDTNGVYSEPRPIGTRYLTRNL

SEQ ID NO: 12634 - protein, 735 aa, Artificial Sequence
  source: /note="Description of Artificial Sequence: Synthetic polypeptide"
MAADGYLPDWLEDTLSEGIRQWWKLKPGPPPPKPAERHKDDSRGLVLPGYKYLGPFNGLDKGEPVNEADAAALEHDKAYDRQLDSGDNPYLKYNHADAEFQERLKEDTSFGGNLGRAVFQAKKRVLEPLGLVEEPVKTAPGKKRPVEHSPVEPDSSSGTGKAGQQPARKRLNFGQTGDADSVPDPQPLGQPPAAPSGLGTNTMATGSGAPMADNNEGADGVGNSSGNWHCDSTWMGDRVITTSTRTWALPTYNNHLYKQISSQSGASNDNHYFGYSTPWGYFDFNRFHCHFSPRDWQRLINNNWGFRPKRLNFKLFNIQVKEVTQNDGTTTIANNLTSTVQVFTDSEYQLPYVLGSAHQGCLPPFPADVFMVPQYGYLTLNNGSQAVGRSSFYCLEYFPSQMLRTGNNFTFSYTFEDVPFHSSYAHSQSLDRLMNPLIDQYLYYLSRTNTPSGTTTQSRLQFSQAGASDIRDQSRNWLPGPCYRQQRVSKTSADNNNSEYSWTGATKYHLNGRDSLVNPGPAMASHKDDEEKFFPQSGVLIFGKQGSEKTNVDIEKVVITDEEEIRTTNPVATEQYGSVSTNLQRGNRQAATADVNTQGVLPGMVWQDRDVYLQGPIWAKIPHTDGHFHPSPLMGGFGLKHPPPQILIKNTPVPANPSTTFSAAKFASFITQYSTGQVSVEIEWELQKENSKRWNPEIQYTSNYNKSVNVDFTVDTNGVYSEPRPIGTRYLTRNL

SEQ ID NO: 12635 - protein, 735 aa, Artificial Sequence
  source: /note="Description of Artificial Sequence: Synthetic polypeptide"
MAADGYLPDWLEDTLSEGIRQWWKLKPGPPPPKPAERHKDDSRGLVLPGYKYLGPFNGLDKGEPVNEADAAALEHDKAYDRQLDSGDNPYLKYNHADAEFQERLKEDTSFGGNLGRAVFQAKKRVLEPLGLVEEPVKTAPGKKRPVEHSPVEPDSSSGTGKAGQQPARKRLNFGQTGDADSVPDPQPLGQPPAAPSGLGTNTMATGSGAPMADNNEGADGVGNSSGNWHCDSTWMGDRVITTSTRTWALPTYNNHLYKQISSQSGASNDNHYFGYSTPWGYFDFNRFHCHFSPRDWQRLINNNWGFRPKRLNFKLFNIQVKEVTQNDGTTTIANNLTSTVQVFTDSEYQLPYVLGSAHQGCLPPFPADVFMVPQYGYLTLNNGSQAVGRSSFYCLEYFPSQMLRTGNNFTFSHTFEDVPFHSSYAHSQSLDRLMNPLIDQYLYYLSRTNTPSGTTTQSRLQFSQAGASDIRDQSRNWLPGPCYRQQRVSKTSADNNNSEYSWTGATKYHLNGRDSLVNPGPAMASHKDDEEKFFPQSGVLIFGKQGSEKTNVDIEKVMITDEEEIRTTNPVATEQYGSVSTNLQRGNRQAATADVNTQGVLPGMVWQDRDVYLQGPIWAKIPHTDGHFHPSPLMGGFGLKHPPPQILIKNTPVPANPSTTFSAAKFASFITQYSTGQVSVEIEWELQKENSKRWNPEIQYTSNYNKSVNVDFTVDTNGVYSEPRPIGTRYLTRNL

SEQ ID NO: 12636 - protein, 735 aa, Artificial Sequence
  source: /note="Description of Artificial Sequence: Synthetic polypeptide"
MAADGYLPDWLEDTLSEGIRQWWKLKPGPPPPKPAERHKDDSRGLVLPGYKYLGPFNGLDKGEPVNEADAAALEHDKAYDRQLDSGDNPYLKYNHADAEFQERLKEDTSFGGNLGRAVFQAKKRVLEPLGLVEEPVKTAPGKKRPVEHSPVEPDSSSGTGKAGQQPARKRLNFGQTGDADSVPDPQPLGQPPAAPSGLGTNTMATGSGAPMADNNEGADGVGNSSGNWHCDSTWMGGRVITTSTRTWALPTYNNHLYKQISSQSGASNDNHYFGYSTPWGYFDFNRFHCHFSPRDWQRLINNNWGFRPKRLNFKLFNIQVKEVTQNDGTTTIANNLTSTVQVFTDSEYQLPYVLGSAHQGCLPPFPADVFMVPQYGYLTLNNGSQAVGRSSFYCLEYFPSQMLRTGNNFTFSYTFEDVPFHSSYAHSQSLDRLMNPLIDQYLYYLSRTNTPSGTTTQSRLQFSQAGASDIRDQSRNWLPGPCYRQQRVSKTSADNNNSEYSWTGATKYHLNGRDSLVNPGPAMASHKDDEEKFFPQSGVLIFGKQGSEKTNVDIEKVMITDEEEIRTTNPVATEQYGSVSTNLQRGNRQAATADVNTQGVLPGMVWQDRDVYLQGPIWAKIPHTDGHFHPSPLMGGFGLKHPPPQILIKNTPVPANPSTTFSAAKFASFITQYSTGQVSVEIEWELQKENSKRWNPEIQYTSNYNKSVNVDFTVDTNGVYSEPRPIGTRYLTRNL

SEQ ID NO: 12637 - protein, 735 aa, Artificial Sequence
  source: /note="Description of Artificial Sequence: Synthetic polypeptide"
MAADGYLPDWLEDTLSEGIRQWWKLKPGPPPPKPAERHKDDSRGLVLPGYKYLGPFNGLDKGEPVNEADAAALEHDKAYDRQLDSGDNPYLKYNHADAEFQERLKEDTSFGGNLGRAVFQAKKRVLEPLGLVEEPVKTAPGKKRPVEHSPVEPDSSSGTGKAGQQPARKRLNFGQTGDADSVPDPQPLGQPPAAPSGLGTNTMATGSGAPMADNNEGADGVGNSSGNWHCDSTWMGDRVITTSTRTWALPTYNNHLYKQISSQSGASNDNHYFGYSTPWGYFDFNRFHCHFSPRDWQRLINNNWGFRPKRPNFKLFNIQVKEVTQNDGTTTIANNLTSTVQVFTDSEYQLPYVLGSAHQGCLPPFPADVFMVPQYGYLTLNNGSQAVGRSSFYCLEYFPSQMLRTGNNFTFSYTFEDVPFHSSYAHSQSLDRLMNPLIDQYLYYLSRTNTPSGTTTQSRLQFSQAGASDIRDQSRNWLPGPCYRQQRVSKTSADNNNSEYSWTGATKYHLNGRDSLVNPGPAMASHKDDEEKFFPQSGVLIFGKQGSEKTNVDIEKVMTTDEEEIRTTNPVATEQYGSVSTNLQRGNRQAATADVNTQGVLPGMVWQDRDVYLQGPIWAKIPHTDGHFHPSPLMGGFGLKHPPPQILIKNTPVPANPSTTFSAAKFASFITQYSTGQVSVEIEWELQKENSKRWNPEIQYTSNYNKSVNVDFTVDTNGVYSEPRPIGTRYLTRNL

SEQ ID NO: 12638 - protein, 735 aa, Artificial Sequence
  source: /note="Description of Artificial Sequence: Synthetic polypeptide"
MAADGYLPDWLEDTLSEGIRQWWKLKPGPPPPKPAERHKDDSRGLVLPGYKYLGPFNGLDKGEPVNEADAAALEHDKAYDRQLDSGDNPYLKYNHADAEFRERLKEDTSFGGNLGRAVFQAKKRVLEPLGLVEEPVKTAPGKKRPVEHSPVEPDSSSGTGKAGQQPARKRLNFGQTGDADSVPDPQPLGQPPAAPSGLGTNTMATGSGAPMADNNEGADGVGNSSGNWHCDSTWMGDRVITTSTRTWALPTYNNHLYKQISSQSGASNDNHYFGYSTPWGYFDFNRFHCHFSPRDWQRLINNNWGFRPKRLNFKLFNIQVKEVTQNDGTTTIANNLTSTVQVFTDSEYQLPYVLGSAHQGCLPPFPADVFMVPQYGYLTLNNGSQAVGRSSFYCLEYFPSQMLRTGNNFTFSYTFEDVPFHSSYAHSQSLDRLMNPLIDQYLYYLSRTNTPSGTTTQSRLQFSQAGASDIRDQSRNWLPGPCYRQQRVSKTSADNNNSEYSWTGATKYHLNGRDSLVNPGPAMASHKDDEEKFFPQSGVLIFGKQGSEKTNVDIEKVMTTDEEEIRTTNPVATEQYGSVSTNLQRGNRQAATADVNTQGVLPGMVWQDRDVYLQGPIWAKIPHTDGHFHPSPLMGGFGLKHPPPQILIKNTPVPANPSTTFSAAKFASFITQYSTGQVSVEIEWELQKENSKRWNPEIQYTSNYNKSVNVDFTVDTNGVYSEPRPIGTRYLTRNL

SEQ ID NO: 12639 - protein, 735 aa, Artificial Sequence
  source: /note="Description of Artificial Sequence: Synthetic polypeptide"
MAADGYLPDWLEDTLSEGIRQWWKLKPGPPPPKPAERHKDDSRGLVLPGYKYLGPFNGLDKGEPVNEADAAALEHDKAYDRQLDSGDNPYLKYNHADAEFQERLKEDTSFGGNLGRAVFQAKKRVLEPLGLVEEPVKTAPGKKRPVEHSPVEPDPSSGTGKAGQQPARKRLNFGQTGDADSVPDPQPLGQPPAAPSGLGTNTMATGSGAPMADNNEGADGVGNSSGNWHCDSTWMGDRVITTSTRTWALPTYNNHLYKQISSQSGASNDNHYFGYSTPWGYFDFNRFHCHFSPRDWQRLINNNWGFRPKRLNFKLFNIQVKEVTQNDGTTTIANNLTSTVQVFTDSEYQLPYVLGSAHQGCLPPFPADVFMVPQYGYLTLNNGSQAVGRSSFYCLEYFPSQMLRTGNNFTFSYTFEDVPFHSSYAHSQSLDRLMNPLIDQYLYYLSRTNTPSGTTTQSRLQFSQAGASDIRDQSRNWLPGPCYRQQRVSKTSADNNNSEYSWTGATKYHLNGRDSLVNPGPAMASHKDDEEKFFPQSGVLIFGKQGSEKTNVDIEKVMITDEEEIRTTNPVATEQYGSVSTNLQRGNRQAATADVNTQGVLPGMVWQDRDVYLQGPIWAKIPHTDGHFHPSPLMGGFGLKHPPPQILIKNTPVPANPSTTFSAAKFASFITQYSTGQVSVEIEWELQKENSKRWNPEIQYTSNYNKSVNVDFTVDTNGVYSEPRPIGTRYLTRNL

SEQ ID NO: 12640 - protein, 735 aa, Artificial Sequence
  source: /note="Description of Artificial Sequence: Synthetic polypeptide"
MAADGYLPDWLEDTLSEGIRQWWKLKPGPPPPKPAERHKDDSRGLVLPGYKYLGPFNGLDKGEPVNEADAAALEHDKAYDRQLDSGDNPYLKYNHADAEFQERLKEDTSFGGNLGRAVFQAKKRVLEPLGLVEEPVKTAPGKKRPVEHSPVEPDSSSGTGKAGQQPARKRLNFGQTGDADSVPDPQPLGQPPAAPSGLGTNTMATGSGAPMADNNEGADGVGNSSGNWHCDSTWMGDRVITTSTRTWALPTYNNHLYKQISSQSGASNDNHYFGYSTPWGYFDFNRFHCHFSPRDWQRLINNNWGFRPKRLNFKLFNIQVKEVTQNDGTTTIANNLTSTVQVFTDSEYQLPYVLGSAHQGCLPPFPADVFMVPQYGYLTLNNGSQAVGRSSFYCLEYFPSQMLRTGNNFTFSYTFEDVPFHSSYAHSQSLDRLMNPLIDQYLYYLSRTNTPSGTTTQSRLQFSQAGASDIRDQSRNWLPGPCYRQQRVSKTSADNNNSEYSWTGATKYHLNGRDSLVNPGPAMASHKDDEEKFFPQSGVLIFGKQGSEKTNVDIEKVMITDEEEIRTTNPVATEQYGSVSTNLQRGNRQAATADVNTQGVLPGMVWQDRDVYLQGPIWAKIPHTDGHFHPSPLMGGFGLKHPPPQILIKNTPVPANPSTTFSAAKFASFITQYSTGQVSVEIEWELQKENSKRWNPEIQYTSNYNKSVNVDFTVDTNGVYSESRPIGTRYLTRNL

SEQ ID NO: 12641 - protein, 735 aa, Artificial Sequence
  source: /note="Description of Artificial Sequence: Synthetic polypeptide"
MAADGYLPDWLEDTLSEGIRQWWKLKPGPPPPKPAERHKDDSRGLVLPGYKYLGPFNGLDKGEPVNEADAAALEHDKAYDRQLDSGDNPYLKYNHADAEFQERLKEDTSFGGNLGRAVFQAKKRVLEPLGLVEEPVKTAPGKKRPVEHSPVEPDSSSGTGKAGQQPARKRLNFGQTGDADSVPDPQPLGQPPAAPSGLGTNTMATGSGAPMADNNEGADGVGNSSGNWHCDSTWMGDRVITTSTRTWALPTYNNHLYKQISSQSGASNDNHYFGYSTPWGYFDFNRFHCHFSPRDWQRLINNNWGFRPKRLNFKLFNIQVKEVTQNDGTTTIANNLTSTVQVFTDSEYQLPYVLGSAHQGCLPPFPADVFMVPQYGYLTPNNGSQAVGRSSFYCLEYFPSQMLRTGNNFTFSYTFEDVPFHSSYAHSQSLDRLMNPLIDQYLYYLSRTNTPSGTTTQSRLQFSQAGASDIRDQSRNWLPGPCYRQQRVSKTSADNNNSEYSWTGATKYHLNGRDSLVNPGPAMASHKDDEEKFFPQSGVLIFGKQGSEKTNVDIEKVMITDEEEIRTTNPVATEQYGSVSTNLQRGNRQAATADVNTQGVLPGMVWQDRDVYLQGPIWAKIPHTDGHFHPSPLMGGFGLKHPPPQILIKNTPVPANPSTTFSAAKFASFITQYSTGQVSVEIEWELQKENSKRWNPEIQYTSNYNKSVNVDFTVDTNGVYSEPRPIGTRYLTRNL

SEQ ID NO: 12642 - protein, 735 aa, Artificial Sequence
  source: /note="Description of Artificial Sequence: Synthetic polypeptide"
MAADGYLPDWLEDTLSEGIRQWWKLKPGPPPPKPAERHKDDSRGLVLPGYKYLGPFNGLDKGEPVNEADAAALEHDKAYDRQLDSGDNPYLKYNHADAEFQERLKEDTSFGGNLGRAVFQAKKRVLEPLGLVEEPVKTAPGKKRPVEHSPVEPDSSSGTGKAGQQPARKRLNFGQTGDADSVPDPQPLGQPPAAPSGLGTNTMATGSGAPMADNNEGADGVGNSSGNWHCDSTWMGDRVITTSTRTWALPTYNNHLYKQISSQSGASNDNHYFGYSTPWGYFDFNRFHCHFSPRDWQRLINNNWGFRPKRLNFKLFNIQVKEVTQNDGTTTIANNLTSTVQVFTDSEYQLPYVLGSAHQGCLPPFPADVFMVPQYGYLTLNNGSQAVGRSSFYCLEYFPSQMLRTGNNFTFSYTFEDVPFHSSYAHSQSLDRLMNPLIDQYLYYLSRTNTPSGTTTQSRLQFSQAGASDIRDQSRNWLPGPCYRQQRVSKTSADNNNSEYSWTGATKYHLNGRDSLVNPGPAMASHKDDEEKFFPQSGVLIFGKQGSEKTNVDIEKVMITDEEEIRTTNPVATEQYGSVSTNLQRGNRQAATADVNTQGVLPGMAWQDRDVYLQGPIWAKIPHTDGHFHPSPLMGGFGLKHPPPQILIKNTPVPANPSTTFSAAKFASFITQYSTGQVSVEIEWELQKENSKRWNPEIQYTSNYNKSVNVDFTVDTNGVYSEPRPIGTRYLTRNL

SEQ ID NO: 12643 - protein, 735 aa, Artificial Sequence
  source: /note="Description of Artificial Sequence: Synthetic polypeptide"
MAADGYLPDWLEDTLSEGIRQWWKLKPGPPPPKPAERHKDDSRGLVLPGYKYLGPFNGLDKGEPVNEADAAALEHDKAYDRQLDSGDNPYLKYNHADAEFQERLKEDTSFGGNLGRAVFQAKKRVLEPLGLVEEPVKTAPGKKRPVEHSPVEPDSSSGTGKAGQQPARKRLNFGQTGDADSVPDPQPLGQPPAAPTSLGSTTMATGSGAPMADNNEGADGVGNSSGNWHCDSQWLGDRVITTSTRTWALPTYNNHLYKQISSQSGASNDNHYFGHSTPWGYFDFNRFHCHFSPRDWQRLINNNWGFRPKRLNFKLFNIQVKEVTQNDGTTTIANNLTSTVQVFTDSEYQLPYVLGSAHQGCLPPFPADVFMVPQYGYLTLNNGSQAVGRSSFYCLEYFPSQMLRTGNNFTFSYTFEDVPFHSSYAHSQSLDRLMNPLIDQYLYYLSRTNTPSGTTTQSRLQFSQAGASDIRDQSRNWLPGPCYRQQRVSKTSADNNNSEYSWTGATKYHLNGRDSLVNPGPAMASHKDDEEKFFPQSGVLIFGKQGSEKTNVDIEKVMITDEEEIRTTNPVATEQYGSVSTNLQRGNRQAATADVNTQGVLPGMVWQDRDVYLQGPIWAKIPHTDGHFHPSPLMGGFGLKHPPPQILIKNTPVPANPSTTFSAAKFASFITQYSTGQVSVEIEWELQKENSKRWNPEIQYTSNYNKSVNVDFTVDTNGVYSEPRPIGTRYLTRNL

SEQ ID NO: 12644 - protein, 735 aa, Artificial Sequence
  source: /note="Description of Artificial Sequence: Synthetic polypeptide"
MAADGYLPDWLEDTLSEGIRQWWKLKPGPPPPKPAERHKDDSRGLVLPGYKYLGPFNGLDKGEPVNEADAAALEHDKAYDRQLDSGDNPYLKYNHADAEFQERLKEDTSFGGNLGRAVFQAKKRVLEPLGLVEEPVKTAPGKKRPVEHSPVEPDSSSGTGKAGQQPARKRLNFGQTGDADSVPDPQPLGQPPAAPSGLGTNTMATGSGAPMADNNEGADGVGNSSGNWHCDSTWMGDRVITTSTRTWALPTYNNHLYKQISSQSGASNDNHYFGYSTPWGYFDFNRFHCHFSPRDWQRLINNNWGFRPKRLNFKLFNIQVKEVTQNDGTTTIANNLTSTVQVFTDSEYQLPYVLGSAHQGCLPPFPADVFMVPQYGYLTLNNGSQAVGRSSFYCLEYFPSQMLRTGNNFTFSYTFEDVPFHSSYAHSQSLDRLMNPLIDQYLYYLSRTNTPSGTTTQSRLQFSQAGASDIRDQSRNWLPGPCYRQQRVSKTSADNNNSEYSWTGATKYHLNGRDSLVNPGPAMASHKDDEEKFFPQSGVLIFGKQGSEKTNVDIEKVMITDEEEIRTTNPVATEQYGSVSTNLQRGNRQAATADVNTQGVLPGMVWQDRDVYLQGPIWAKIPHTDGHFHPSPLMGGFGLKHPPPQILIKNTPVPANPSTTFSAAKFASFITQYSTGQASVEIEWELQKENSKRWNPEIQYTSNYNKSVNVDFTVDTNGVYSEPRPIGTRYLTRNL

SEQ ID NO: 12645 - protein, 735 aa, Artificial Sequence
  source: /note="Description of Artificial Sequence: Synthetic polypeptide"
MAADGYLPDWLEDTLSEGIRQWWKLKPGPPPPKPAERHKDDSRGLVLPGYKYLGPFNGLDKGEPVNEADAAALEHDKAYDRQLDSGDNPYLKYNHADAEFQERLKEDTSFGGNLGRAVFQAKKRVLEPLGLVEEPVKTAPGKKRPVEHSPVEPDSSSGTGKAGQQPARKRLNFGQTGDADSVPDPQPLGQPPAAPSGLGTNTMATGSGAPMADNNEGADGVGNSSGNWHCDSTWMGDRVITTSTRTWALPTYNNHLYKQISSQSGASNDNHYFGYSTPWGYFDFNRFHCHFSPRDWQRLINNNWGFRPKRLNFKLFNIQVKEVTQNDGTTTIANNLTSTVQVFTDSEYQLPYVLGSAHQGCLPPFPADVFMVPQYGYLTLNNGSQAVGRSSFYCLEYFPSQMLRTGNNFTFSYTFEDVPFHSSYAHSQSLDRLMNPLIDQYLYYLSRTNTPSGTTTQSRLQFSQAGASDIRDQSRNWLPGPCYRQQRVSKTSADNNNSEYSWTGATKYHLNGRDSLVNPGPAMASHKDDEEKFFPQSGVLIFGKQGSEKTNVDIEKVMITDEEEIRTTNPVATEQYGSVSTNLQRGNRQAATADVNTQGVLPGMVWQDRDVYLQGPIWAKIPHTDGHFHPSPLMGGFGLKHPPPQILIKNTPVPANPSTTFSAARFASFITQYSTGQVSVEIEWELQKENSKRWNPEIQYTSNYNKSVNVDFTVDTNGVYSEPRPIGTRYLTRNL

SEQ ID NO: 12646 - protein, 735 aa, Artificial Sequence
  source: /note="Description of Artificial Sequence: Synthetic polypeptide"
MAADGYLPDWLEDTLSEGIRQWWKLKPGPPPPKPAERHKDDSRGLVLPGYKYLGPFNGLDKGEPVNEADAAALEHDKAYDRQLDSGDNPYLKYNHADAEFQERLKEDTSFGGNLGRAVFQAKKRVLEPLGLVEEPVKTAPGKKRPVEHSPVEPDSSSGTGKAGQQPARKRLNFGQTGGADSVPDPQPLGQPPAAPSGLGTNTMATGSGAPMADNNEGADGVGNSSGNWHCDSTWMGDRVITTSTRTWALPTYNNHLYKQISSQSGASNDNHYFGYSTPWGYFDFNRFHCHFSPRDWQRLINNNWGFRPKRLNFKLFNIQVKEVTQNDGTTTIANNLTSTVQVFTDSEYQLPYVLGSAHQGCLPPFPADVFMVPQYGYLTLNNGSQAVGRSSFYCLEYFPSQMLRTGNNFTFSYTFEDVPFHSSYAHSQSLDRLMNPLIDQYLYYLSRTNTPSGTTTQSRLQFSQAGASDIRDQSRNWLPGPCYRQQRVSKTSADNNNSEYSWTGATKYHLNGRDSLVNPGPAMASHKDDEEKFFPQSGVLIFGKQGSEKTNVDIEKVMITDEEEIRTTNPVATEQYGSVSTNLQRGNRQAATADVNTQGVLPGMVWQDRDVYLQGPIWAKIPHTDGHFHPSPLMGGFGLKHPPPQILIKNTPVPANPSTTFSAAKFASFITQYSTGQVSVEIEWELQKENSKRWNPEIQYTSNYNKSVNVDFTVDTNGVYSEPRPIGTRYLTRNL

SEQ ID NO: 12647 - protein, 735 aa, Artificial Sequence
  source: /note="Description of Artificial Sequence: Synthetic polypeptide"
MAADGYLPDWLEDTLSEGIRQWWKLKPGPPPPKPAERHKDDSRGLVLPGYKYLGPFNGLDKGEPVNEADAAALEHDKAYDRQLDSGDNPYLKYNHADAEFQERLKEDTSFGGNLGRAVFQAKKRVLEPLGLVEEPVKTAPGKKRPVEHSPVEPDSSSGTGKAGQQPARKRLNFGQTGDADSVPDPQPLGQPPAAPSGLGTNTMATGSGAPMADNNEGADGVGNSSGNWHCDSTWMGDRVITTSTRTWALPTYNNHLYKQISSQSGASNDNHYFGYSTPWGYFDFNRFHCHFSPRDWQRLINNNWGFRPKRLNFKLFNIQVKEVTQNDGTTTIANNLTSTVQVFTDSEYQLPYVLGSAHQGCLPPFPADVFMVPQYGYLTLNNGSQAVGRSSFYCLEYFPSQMLRTGNNFTFSYTFEDVPFHSSYAHSQSLDRLMNPLIDQYLYYLSRTNTPSGTTTQSRLQFSQAGASDIRDQSRNWLPGPCYRQQRVSKTSADNNNSEYSWTGATKYHLNGRDSLVNPGPAMASHKDDEEKFFPQSGVLIFGKQGSEKTNVDIEKVMITDEEEIRTTNPVATEQYGSVSTNLQRGNRQAATADVNTQGVLPGMVWQDRDVYLQGPIWAKIPHTDGHFHPSPLMGGFGLKHPPPQILIKNTPVPANPSTTFSAAKFASFITQYSTGQVSVEIEWELQKENSKRWNPEIQYTSNYNKSANVDFTVDTNGVYSEPRPIGTRYLTRNL

SEQ ID NO: 12648 - protein, 735 aa, Artificial Sequence
  source: /note="Description of Artificial Sequence: Synthetic polypeptide"
MAADGYLPDWLEDTLSEGIRQWWKLKPGPPPPKPAERHKDDSRGLVLPGYKYLGPFNGLDKGEPVNEADAAALEHDKAYDRQLDSGDNPYLKYNHADAEFQERLKEDTSFGGNLGRAVFQAKKRVLEPLGLVEEPVKTAPGKKRPVEHSPVEPDSSSGTGKAGQQPARKRLNFGQTGDADSVPDPQPLGQPPAAPSGLGTNTMATGSGAPMADNNEGADGVGNSSGNWHCDSTWMGDRVITTSTRTWALPTYNNHLYKQISSQSGASNDNHYFGYSTPWGYFDFNRFHCHFSPRDWQRLINNNWGFRPKRLNFKLFNIQVKEVTQNDGTTTIANNLTSTVQVFTDSEYQLPYVLGSAHQGCLPPFPADVFMVPQYGYLTLNNGSQAVGRSSFYCLEYFPSQMLRTGNNFTFSYTFEDVPFHSSYAHSQSLDRLMNPLIDQYLYYLSRTNTPSGTTTQSRLQFSQAGASDIRDRSRNWLPGPCYRQQRVSKTSADNNNSEYSWTGATKYHLNGRDSLVNPGPAMASHKDDEEKFFPQSGVLIFGKQGSEKTNVDIEKVMITDEEEIRTTNPVATEQYGSVSTNLQRGNRQAATADVNTQGVLPGMVWQDRDVYLQGPIWAKIPHTDGHFHPSPLMGGFGLKHPPPQILIKNTPVPANPSTTFSAAKFASFITQYSTGQVSVEIEWELQKENSKRWNPEIQYTSNYNKSVNVDFTVDTNGVYSEPRPIGTRYLTRNL

SEQ ID NO: 12649 - protein, 735 aa, Artificial Sequence
  source: /note="Description of Artificial Sequence: Synthetic polypeptide"
MAADGYLPDWLEDTLSEGIRQWWKLKPGPPPPKPAERHKDDSRGLVLPGYKYLGPFNGLDKGEPVNEADAAALEHDKAYDRQLDSGDNPYLKYNHADAEFQERLKEDTSFGGNLGRAVFQAKKRVLEPLGLVEEPVKTAPGKKRPVEHSPVEPDSSSGTGKAGQQPARKRLNFGQTGDADSVPDPQPLGQPPAAPSGLGTNTMATGSGAPMADNNEGADGVGNSSGNWHCDSTWMGDRVITTSTRTWALPTYNNHLYKQISSQSGASNDNHYFGYSTPWGYFDFNRFHCHFSPRDWQRLINNNWGFRPKRLNFKLFNIQVKEVTQNDGTTTIANNLTSTVQVFTDSEYQLPYVLGSAHQGCLPPFPADVFMVPQYGYLTLNNGSQAVGRSSFYCLEYFPSQMLRTGNNFTFSYTFEDVPFHSSYAHSQSLDRLMNPLIDQYLYYLSRTNTPSGTTTQSRLQFSQAGASDIRDQSRNWLPGPCYRQQRVSKASADNNNSEYSWTGATKYHLNGRDSLVNPGPAMASHKDDEEKFFPQSGVLIFGKQGSEKTNVDIEKVMITDEEEIRTTNPVATEQYGSVSTNLQRGNRQAATADVNTQGVLPGMVWQDRDVYLQGPIWAKIPHTDGHFHPSPLMGGFGLKHPPPQILIKNTPVPANPSTTFSAAKFASFITQYSTGQVSVEIEWELQKENSKRWNPEIQYTSNYNKSVNVDFTVDTNGVYSEPRPIGTRYLTRNL

SEQ ID NO: 12650 - protein, 735 aa, Artificial Sequence
  source: /note="Description of Artificial Sequence: Synthetic polypeptide"
MAADGYLPDWLEDTLSEGIRQWWKLKPGPPPPKPAERHKDDSRGLVLPGYKYLGPFNGLDKGEPVNEADAAALEHDKAYDRQLDSGDNPYLKYNHADAEFQERLKEDTSFGGNLGRAVFQAKKRVLEPLGLVEEPVKTAPGKKRPVEHSPVEPDSSSGTGKAGQQPARKRLNFGQTGDADSVPDPQPLGQPPAAPSGLGTNTMATGSGAPMADNNEGADGVGNSSGNWHCDSTWMGDRVITTSTRTWALPTYNNHLYKQISSQSGASNDNHYFGYSTPWGYFDFNRFHCHFSPRDWQRLINNNWGFRPKRLNFKLFNIQVKEVTQNDGTTTIANNLTSTVQVFTDSEYQLPYVLGSAHQGCLPPFPADVFMVPQYGYLTLNNGSQAVGRSSFYCLEYFPSQMLRTGNNFTFSYTFEDVPFHSSYAHSQSLDRLMNPLIDQYLYYLSRTNTPSGTTTQSRLQFSQAGASDIRDQSRNWLPGPCYRQQRVSKTSADNNNSEYSWTGATKHHLNGRDSLVNPGPAMASHKDDEEKFFPQSGVLIFGKQGSEKTNVDIEKVMITDEEEIRTTNPVATEQYGSVSTNLQRGNRQAATADVNTQGVLPGMVWQDRDVYLQGPIWAKIPHTDGHFHPSPLMGGFGLKHPPPQILIKNTPVPANPSTTFSAAKFASFITQYSTGQVSVEIEWELQKENSKRWNPEIQYTSNYNKSVNVDFTVDTNGVYSEPRPIGTRYLTRNL

SEQ ID NO: 12651 - protein, 735 aa, Artificial Sequence
  source: /note="Description of Artificial Sequence: Synthetic polypeptide"
MAADGYLPDWLEDTLSEGIRQWWKLKPGPPPPKPAERHKDDSRGLVLPGYKYLGPFNGLDKGEPVNEADAAALEHDKAYDRQLDSGDNPYLKYNHADAEFQERLKEDTSFGGNLGRAVFQAKKRVLEPLGLVEEPVKTAPGKKRPVEHSPVEPDSSSGTGKAGQQPARKRLNFGQTGDADSVPDPQPLGQPPAAPSGLGTNTMATGSGAPMADNNEGADGVGNSSGNWHCDSTWMGDRVITTSTRTWALPTYNNHLYKQISSQSGASNDNHYFGYSTPWGYFDFNRFHCHFSPRDWQRLINNNWGFRPKRLNFKLFNIQVKEVTQNDGTTTIANNLTGTVQVFTDSEYQLPYVLGSAHQGCLPPFPADVFMVPQYGYLTLNNGSQAVGRSSFYCLEYFPSQMLRTGNNFTFSYTFEDVPFHSSYAHSQSLDRLMNPLIDQYLYYLSRTNTPSGTTTQSRLQFSQAGASDIRDQSRNWLPGPCYRQQRVSKTSADNNNSEYSWTGATKYHLNGRDSLVNPGPAMASHKDDEEKFFPQSGVLIFGKQGSEKTNVDIEKVMITDEEEIRTTNPVATEQYGSVSTNLQRGNRQAATADVNTQGVLPGMVWQDRDVYLQGPIWAKIPHTDGHFHPSPLMGGFGLKHPPPQILIKNTPVPANPSTTFSAAKFASFITQYSTGQVSVEIEWELQKENSKRWNPEIQYTSNYNKSVNVDFTVDTNGVYSEPRPIGTRYLTRNL

SEQ ID NO: 12652 - protein, 735 aa, Artificial Sequence
  source: /note="Description of Artificial Sequence: Synthetic polypeptide"
MAADGYLPDWLEDTLSEGIRQWWKLKPGPPPPKPAERHKDDSRGLVLPGYKYLGPFNGLDKGEPVNEADAAALEHDKAYDRQLDSGDNPYLKYNHADAEFQERLKEDTSFGGNLGRAVFRAKKRVLEPLGLVEEPVKTAPGKKRPVEHSPVEPDSSSGTGKAGQQPARKRLNFGQTGDADSVPDPQPLGQPPAAPSGLGTNTMATGSGAPMADNNEGADGVGNSSGNWHCDSTWMGDRVITTSTRTWALPTYNNHLYKQISSQSGASNDNHYFGYSTPWGYFDFNRFHCHFSPRDWQRLINNNWGFRPKRLNFKLFNIQVKEVTQNDGTTTIANNLTSTVQVFTDSEYQLPYVLGSAHQGCLPPFPADVFMVPQYGYLTLNNGSQAVGRSSFYCLEYFPSQMLRTGNNFTFSYTFEDVPFHSSYAHSQSLDRLMNPLIDQYLYYLSRTNTPSGTTTQSRLQFSQAGASDIRDQSRNWLPGPCYRQQRVSKTSADNNNSEYSWTGATKYHLNGRDSLVNPGPAMASHKDDEEKFFPQSGVLIFGKQGSEKTNVDIEKVMITDEEEIRTTNPVATEQYGSVSTNLQRGNRQAATADVNTQGVLPGMVWQDRDVYLQGPIWAKIPHTDGHFHPSPLMGGFGLKHPPPQILIKNTPVPANPSTTFSAAKFASFITQYSTGQVSVEIEWELQKENSKRWNPEIQYTSNYNKSVNVDFTVDTNGVYSEPRPIGTRYLTRNL

SEQ ID NO: 12653 - protein, 735 aa, Artificial Sequence
  source: /note="Description of Artificial Sequence: Synthetic polypeptide"
MAADGYLPDWLEDTLSEGIRQWWKLKPGPPPPKPAERHKDDSRGLVLPGYKYLGPFNGLDKGEPVNEADAAALEHDKAYDRQLDSGDNPYLKYNHADAEFQERLKEDTSFGGNLGRAVFQAKKRVLEPLGLVEEPVKTAPGKKRPVEHSPVEPDSSSGTGKAGQQPARKRLNFGQTGDADSVPDPQPLGQPPAAPSGLGTNTMATGSGAPMADNNEGADGVGNSSGNWHCDSTWMGDRVITTSTRTWALPTYNNHLYKQISSQSGASNDNHYFGYSTPWGYFDFNRFHCHFSPRDWQRLINNNWGFRPKRLNFKLFNIQVKEVTQNDGTTTIANNLTSTVQVFTDSEYQLPYVLGSAHQGCLPPFPADVFMVPQYGYLTLNNGSQAVGRSSFYCLEYFPSQMLRTGNNFTFSYTFEDVPFHSSYAHSQSLDRLMNPLIDQYLYYLSRTNTPSGTTTQSRLQFSQAGASDIRDQSRNWLPGPCYRQQRVSKTSADNNNSEYSWTGATKYHLNGRDSLVNPGPAMASHKDDEEKFFPQSGVLIFGKQGSEKTNVDIEKVMITDEEEIRTTNPVATEQYGSVSTNLQRGNRQAATADVNTQGVLPGTVWQDRDVYLQGPIWAKIPHTDGHFHPSPLMGGFGLKHPPPQILIKNTPVPANPSTTFSAAKFASFITQYSTGQASVEIEWELQKENSKRWNPEIQYTSNYNKSVNVDFTVDTNGVYSEPRPIGTRYLTRNL

SEQ ID NO: 12654 - protein, 735 aa, Artificial Sequence
  source: /note="Description of Artificial Sequence: Synthetic polypeptide"
MAADGYLPDWLEDTLSEGIRQWWKLKPGPPPPKPAERHKDASRGLVLPGYKYLGPFNGLDKGEPVNEADAAALEHDKAYDRQLDSGDNPYLKYNHADAEFQERLKEDTSFGGNLGRAVFQAKKRVLEPLGLVEEPVKTAPGKKRPVEHSPVEPDSSSGTGKAGQQPARKRLNFGQTGDADSVPDPQPLGQPPAAPTSLGSTTMATGSGAPMADNNEGADGVGNSSGNWHCDSQWLGDRVITTSTRTWALPTYNNHLYKQISSQSGASNDNHYFGYSTPWGYFDFNRFHCHFSPRDWQRLINNNWGFRPKRLNFKLFNIQVKEVTQNDGTTTIANNLTSTVQVFTDSEYQLPYVLGSAHQGCLPPFPADVFMVPQYGYLTLNNGSQAVGRSSFYCLEYFPSQMLRTGNNFTFSYTFEDVPFHSSYAHSQSLDRLMNPLIDQYLYYLSRTNTPSGTTTQSRLQFSQAGASDIRDQSRNWLPGPCYRQQRVSKTSADNNNSEYSWTGATKYHLNGRDSLVNPGPAMASHKDDEEKFFPQSGVLIFGKQGSEKTNVDIEKVMITDEEEIRTTNPVATEQYGSVSTNLQRGNRQAATADVNTQGVLPGMVWQDRDVYLQGPIWAKIPHTDGHFHPSPLMGGFGLKHPPPQILIKNTPVPANPSTTFSAAKFASFITQYSTGQVSVEIEWELQKENSKRWNPEIQYTSNYNKSVNVDFTVDTNGVYSEPRPIGTRYLTRNL

SEQ ID NO: 12655 - protein, 735 aa, Artificial Sequence
  source: /note="Description of Artificial Sequence: Synthetic polypeptide"
MAADGYLPDWLEDTLSEGIRQWWKLKPGPPPPKPAERHKDDSRGLVLPGYKYLGPFNGLDKGEPVNEADAAALEHDKAYDRQLDSGDNPYLKYNHADAEFQERLKEDTSFGGNLGRAVFQAKKRVLEPLGLVEEPVKTAPGKKRPVEHSPVEPDSSSGTGKAGQQPARKRLNFGQTGDADSVPDPQPLGQPPAAPSGLGTNTMATGSGAPMADNNEGADGVGNSSGNWHCDSTWMGDRVITTSTRTWALPTYNNHLYKQISSQSGAPNDNHYFGYSTPWGYFDFNRFHCHFSPRDWQRLINNNWGFRPKRLNFKLFNIQVKEVTQNDGTTTIANNLTSTVQVFTDSEYQLPYVLGSAHQGCLPPFPADVFMVPQYGYLTLNNGSQAVGRSSFYCLEYFPSQMLRTGNNFTFSYTFEDVPFHSSYAHSQSLDRLMNPLIDQYLYYLSRTNTPSGTTTQSRLQFSQAGASDIRDQSRNWLPGPCYRQQRVSKTSADNNNSEYSWTGATKYHLNGRDSLVNPGPAMASHKDDEEKFFPQSGVLIFGKQGSEKTNVDIEKVMITDEEEIRTTNPVATEQYGSVSTNLQRGNRQAATADVNTQGVLPGMVWQDRDVYLQGPIWAKIPHTDGHFHPSPLMGGFGLKHPPPQILIKNTPVPANPSTTFSAAKFASFITQYSTGQASVEIEWELQKENSKRWNPEIQYTSNYNKSVNVDFTVDTNGVYSEPRPIGTRYLTRNL

SEQ ID NO: 12656 - protein, 735 aa, Artificial Sequence
  source: /note="Description of Artificial Sequence: Synthetic polypeptide"
MAADGYLPDWLEDTLSEGIRQWWKLKPGPPPPKPAERHKDDSRGLVLPGYKYLGPFNGLDKGEPVNEADAAALEHDKAYDRQLDSGDNPYLKYNHADAEFQERLKEDTSFGGNLGRAVFQAKKRVLEPLGLVEEPVKTAPGKKRPVEHSPVEPDSSSGTGKAGQQPARKRLNFGQTGDADSVPDPQPLGQPPAAPTSLGSTTMATGSGAPMADNNEGADGVGNSSGNWHCDSQWLGDRVITTSTRTWALPTYNNHLYKQISSQSGASNDNHYFGYSTPWGYFDFNRFHCHFSPRDWQRLINNNWGFRPKRLNFKLFNIQVKEVTQNDGTTTIANNLTSTVQVFTDSEYQLPYVLGSAHQGCLPPFPADVFMVPQYGYLTLNNGSQAVGRSSFYCLEYFPSQMLRTGNNFTFSYTFEDVPFHSSYAHSQSLDRLMNPLIDQYLYYLSRTNTPSGTTTQSRLQFSQAGASDIRDQSRNWLPGPCYRQQRVSKTSADNNNSEYSWTGATKYHLNGRDSLVNPGPAMASHKDDEEKFFPQSGVLIFGKQGSEKTNVDIEKVMITDEEEIRTTNPVATEQYGSVSTNLQRGNRQAATADVNTQGVLPGMVWQDRDVYLQGPIWAKIPHTDGHFHPSPLMGGFGLKHPPPQILIKNTPVPANPSTTFSAAKFASFITQYSTGQVSVEIEWELQKENSKRWNPEIQYTSNYNKSVNVDFTVDTNGVYSEPRPIGTRYLTRNL

SEQ ID NO: 12657 - protein, 735 aa, Artificial Sequence
  source: /note="Description of Artificial Sequence: Synthetic polypeptide"
MAADGYLPDWLEDILSEGIRQWWKLKPGPPPPKPAERHKDASRGLVLPGYKYLGPFNGLDKGEPVNEADAAALEHDKAYDRQLDSGDNPYLKYNHADAEFQERLKEDTSFGGNLGRAVFQAKKRVLEPLGLVEEPVKTAPGKKRPVEHSPVEPDSSSGTGKAGQQPARKRLNFGQTGDADSVPDPQPLGQPPAAPTSLGSTTMATGSGAPMADNNEGADGVGNSSGNWHCDSQWLGDRVITTSTRTWALPTYNNHLYKQISSQSGASNDNHYFGYSTPWGYFDFNRFHCHFSPRDWQRLINNNWGFRPKRLNFKLFNIQVKEVTQNDGTTTIANNLTSTVQVFTDSEYQLPYVLGSAHQGCLPPFPADVFMVPQYGYLTLNNGSQAVGRSSFYCLEYFPSQMLRTGNNFTFSYTFEDVPFHSSYAHSQSLDRLMNPLIDQYLYYLSRTNTPSGTTTQSRLQFSQAGASDIRDQSRNWLPGPCYRQQRVSKTSADNNNSEYSWTGATKYHLNGRDSLVNPGPAMASHKDDEEKFFPQSGVLIFGKQGSEKTNVDIEKVMITDEEEIRTTNPVATEQYGSVSTNLQRGNRQAATADVNTQGVLPGMVWQDRDVYLQGPIWAKIPHTDGHFHPSPLMGGFGLKHPPPQILIKNTPVPANPSTTFSAAKFASFITQYSTGQVSVEIEWELQKENSKRWNPEIQYTSNYNKSVNVDFTVDTNGVYSEPRPIGTRYLTRNL

SEQ ID NO: 12658 - protein, 735 aa, Artificial Sequence
  source: /note="Description of Artificial Sequence: Synthetic polypeptide"
MAADGYLPDWLEDTLSEGIRQWWKLKPGPPPPKPAERHKDASRGLVLPGYKYLGPFNGLDKGEPVNEADAAALEHDKAYDRQLDSGDNPYLKYNHADAEFQERLKEDTSFGGNLGRAVFQAKKRVLEPLGLVEEPVKTAPGKKRPVEHSPVEPDSSSGTGKAGQQPARKRLNFGQTGDADSVPDPQPLGQPPAAPSGLGTNTMATGSGAPMADNNEGADGVGNSSGNWHCDSTWMGDRVITTSTRTWALPTYNNHLYKQISSQSGASNDNHYFGYSTPWGYFDFNRFHCHFSPRDWQRLINNNWGFRPKRLNFKLFNIQVKEVTQNDGTTTIANNLTSTVQVFTDSEYQLPYVLGSAHQGCLPPFPADVFMVPQYGYLTLNNGSQAVGRSSFYCLEYFPSQMLRTGNNFTFSYTFEDVPFHSSYAHSQSLDRLMNPLIDQYLYYLSRTNTPSGTTTQSRLQFSQAGASDIRDQSRNWLPGPCYRQQRVSKTSADNNNSEYSWTGATKYHLNGRDSLVNPGPAMASHKDDEEKFFPQSGVLIFGKQGSEKTNVDIEKVMITDEEEIRTTNPVATEQYGSVSTNLQRGNRQAATADVNTQGVLPGMVWQDRDVYLQGPIWAKIPHTDGHFHPSPLMGGFGLKHPPPQILIKNTPVPANPSTTFSAAKFASFITQYSTGQASVEIEWELQKENSKRWNPEIQYTSNYNKSVNVDFTVDTNGVYSEPRPIGTRYLTRNL

SEQ ID NO: 12659 - protein, 735 aa, Artificial Sequence
  source: /note="Description of Artificial Sequence: Synthetic polypeptide"
MAADGYLPDWLEDTLSEGIRQWWKLKPGPPPPKPAERHKDDSRGLVLPGYKYLGPFNGLDKGEPVNEADAAALEHDKAYDRQLDSGDNPYLKYNHADAEFQERLKEDTSFGGNLGRAVFQAKKRVLEPLGLVEEPVKTAPGKKRPVEHSPVEPDSSSGTGKAGQQPARKRLNFGQTGDADSVPDPQPLGQPPAAPTSLGSTTMATGSGAPMADNNEGADGVGNSSGNWHCDSTWMGDRVITTSTRTWALPTYNNHLYKQISSQSGASNDNHYFGYSTPWGYFDFNRFHCHFSPRDWQRLINNNWGFRPKRLNFKLFNIQVKEVTQNDGTTTIANNLTSTVQVFTDSEYQLPYVLGSAHQGCLPPFPADVFMVPQYGYLTLNNGSQAVGRSSFYCLEYFPSQMLRTGNNFTFSYTFEDVPFHSSYAHSQSLDRLMNPLIDQYLYYLSRTNTPSGTTTQSRLQFSQAGASDIRDQSRNWLPGPCYRQQRVSKTSADNNNSEYSWTGATKYHLNGRDSLVNPGPAMASHKDDEEKFFPQSGVLIFGKQGSEKTNVDIEKVMITDEEEIRTTNPVATEQYGSVSTNLQRGNRQAATADVNTQGVLPGMVWQDRDVYLQGPIWAKIPHTDGHFHPSPLMGGFGLKHPPPQILIKNTPVPANPSTTFSAAKFASFITQYSTGQASVEIEWELQKENSKRWNPEIQYTSNYNKSVNVDFTVDTNGVYSEPRPIGTRYLTRNL

SEQ ID NO: 12660 - protein, 735 aa, Artificial Sequence
  source: /note="Description of Artificial Sequence: Synthetic polypeptide"
MAADGYLPDWLEDTLSEGIRQWWKLKPGPPPPKPAERHKDASRGLVLPGYKYLGPFNGLDKGEPVNEADAAALEHDKAYDRQLDSGDNPYLKYNHADAEFQERLKEDTSFGGNLGRAVFQAKKRVLEPLGLVEEPVKTAPGKKRPVEHSPVEPDSSSGTGKAGQQPARKRLNFGQTGDADSVPDPQPLGQPPAAPSGLGTNTMATGSGAPMADNNEGADGVGNSSGNWHCDSTWMGDRVITTSTRTWALPTYNNHLYKQISSQSGASNDNHYFGYSTPWGYFDFNRFHCHFSPRDWQRLINNNWGFRPKRLNFKLFNIQVKEVTQNDGTTTIANNLTSTVQVFTDSEYQLPYVLGSAHQGCLPPFPADVFMVPQYGYLTLNNGSQAVGRSSFYCLEYFPSQMLRTGNNFTFSYTFEDVPFHSSYAHSQSLDRLMNPLIDQYLYYLSRTNTPSGTTTQSRLQFSQAGASDIRDQSRNWLPGPCYRQQRVSKTSADNNNSEYSWTGATKYHLNGRDSLVNPGPAMASHKDDEEKFFPQSGVLIFGKQGSEKTNVDIEKVMITDEEEIRTTNPVATEQYGSVSTNLQRGNRQAATADVNTQGVLPGMVWQDRDVYLQGPIWAKIPHTDGHFHPSPLMGGFGLKHPPPQILIKNTPVPANPSTTFSAAKFASFITQYSTGQVSVEIEWELQKENSKRWNPEIQYTSNYNKSVNVDFTVDTNGVYSEPRPIGTRYLTRNL

SEQ ID NO: 12661 - protein, 735 aa, Artificial Sequence
  source: /note="Description of Artificial Sequence: Synthetic polypeptide"
MAADGYLPDWLEDTLSEGIRQWWKLKPGPPPPKPAERHKDASRGLVLPGYKYLGPFNGLDKGEPVNEADAAALEHDKAYDRQLDSGDNPYLKYNHADAEFQERLKEDTPFGGNLGRAVFQAKKRVLEPLGLVEEPVKTAPGKKRPVEHSPVEPDSSSGTGKAGQRPARKRLNFGQTGDADSVPDPQPLGQPPAAPTSLGSTTMATGSGAPMADNNEGADGVGNSSGNWHCDSQWLGDRVITTSTRTWALPTYNNHLYKQIPSQSGASNDNHYFGYSTPWGYFDFNRFHCHFSPRDWQRLINNNWGFRPKRLNFKLFNIQVKEVTQNDGTTTIANNLTSTVQVFTDSEYQLPYVLGSAHQGCLPPFPADVFMVPQYGYLTLNNGSQAVGRSSFYCLEYFPSQMLRTGNNFTFSYTFEDVPFHSSYAHSQSLDRLMNPLIDQYLYYLSRTNTPSGTTTQSRLQFSQAGASDIRDQSRNWLPGPCYRQQRVSKTSADNNNSEYSWTGATKYHLNGRDSLVNPGPAMASHKDDEEKFFPQSGVLIFGKQGSEKTNVDIEKVMITDEEEIRTTNPVATEQYGSVSTNLQRGNRQAATADVNTQGVLPGMVWQDRDVYLQGPIWAKIPHTDGHFHPSPLMGGFGLKHPPPQILIKNTPVPANPSTTFSAAKFASFITQYSTGQASVEIEWELQKENSKRWNPEIQYTSNYNKSVNVDFTVDTNGVYSEPRPIGTRYLTRNL

SEQ ID NO: 12662 - protein, 735 aa, Artificial Sequence
  source: /note="Description of Artificial Sequence: Synthetic polypeptide"
MAADGYLPDWLEDTLSEGIRQWWKLKPGPPPPKPAERHKDDSRGLVLPGYKYLGPFNGLDKGEPVNEADAAALEHDKAYDRQLDSGDNPYLKYNHADAEFQERLKEDTSFGGNLGRAVFQAKKRVLEPLGLVEEPVKTAPGKKRPVEHSPVEPDSSSGTGKAGQQPARKRLNFGQTGDADSVPDPQPLGQPPAAPTSLGSTTMATGSGAPMADNNEGADGVGNSSGNWHCDSTWMGDRVITTSTRTWALPTYNNHLYKQISSQSGASNDNHYFGYSTPWGYFDFNRFHCHFSPRDWQRLINNNWGFRPKRLNFKLFNIQVKEVTQNDGTTTIANNLTSTVQVFTDSEYQLPYVLGSAHQGCLPPFPADVFMVPQYGYLTLNNGSQAVGRSSFYCLEYFPSQMLRTGNNFTFSYTFEDVPFHSSYAHSQSLDRLMNPLTDQYLYYLSRTNTPSGTTTQSRLQFSQAGASDIRDQSRNWLPGPCYRQQRVSKTSADNNNSEYSWTGATKYHLNGRDSLVNPGPAMASHKDDEEKFFPQSGVLIFGKQGSEKTNVDIEKVMITDEEEIRTTNPVATEQYGSVSTNLQRGNRQAATADVNTQGVLPGMVWQDRDVYLQGPIWAKIPHTDGHFHPSPLMGGFGLKHPPPQILIKNTPVPANPSTTFSAAKFASFITQYSTGQVSVEIEWELQKENSKRWNPEIQYTSNYNKSVNVDFTVDTNGVYSEPRPIGTRYLTRNL

SEQ ID NO: 12663 - protein, 735 aa, Artificial Sequence
  source: /note="Description of Artificial Sequence: Synthetic polypeptide"
MAADGYLPDWLEDTLSEGIRQWWKLKPGPPPPKPAERHKDDSRGLVLPGYKYLGPFNGLDKGEPVNEADAAALEHDKAYDRQLDSGDNPYLKYNHADAEFQERLKEDTSFGGNLGRAVFQAKKRVLEPLGLVEEPVKTAPGKKRPVEHSPVEPDSSSGTGKAGQQPARKRLNFGQTGDADSVPDPQPLGQPPAAPSGLGTNTMATGSGAPMADNNEGADGVGNSSGNWHCDSTWMGDRVITTSTRTWALPTYNNHLYKQISSQSGASNDNHYFGYSTPWGYFDFNRFHCHFSPRDWQRLINNNWGFRPKRLNFKLFNIQVKEVTQNDGTTTIANNLTSTVQVFTDSEYQLPYVLGSAHQGCLPPFPADVFMVPQYGYLTLNNGSQAVGRSSFYCLEYFPSQMLRTGNNFTFSYTFEDVPFHSSYAHSQSLDRLMNPLIDQYLYYLSRTNTPSGTTAQSRLQFSQAGASDIRDQSRNWLPGPCYRQQRVSKTSADNNNSEYSWTGATKYHLNGRDSLVNPGPAMASHKDDEEKFFPQSGVLIFGKQGSEKTNVDIEKVMITDEEEIRTTNPVATEQYGSVSTNLQRGNRQAATADVNTQGVLPGMVWQDRDVYLQGPIWAKIPHTDGHFHPSPLMGGFGLKHPPPQILIKNTPVPANPSTTFSAAKFASFITQYSTGQVSVEIEWELQKENSKRWNPEIQYTSNYNKSVNVDFTVDTNGVYSEPRPIGTRYLTRNL

SEQ ID NO: 12664 - protein, 735 aa, Artificial Sequence
  source: /note="Description of Artificial Sequence: Synthetic polypeptide"
MAADGYLPDWLEDTLSEGIRQWWKLKPGPPPPKPAERHKDDSRGLVLPGYKYLGPFNGLDKGEPVNEADAAALEHDKAYDRQLDSGDNPYLKYNHADAEFQERLKEDTSFGGNLGRAVFQAKKRVLEPLGLVEEPVKTAPGKKRPVEHSPVEPDSSSGTGKAGQQPARKRLNFGQTGDADSVPDPQPLGQPPAAPSGLGTNTMATGSGAPMADNNEGADGVGNSSGNWHCDSTWMGDRVITTSTRTWALPTYNNHLYKQISSQSGASNGNHYFGYSTPWGYFDFNRFHCHFSPRDWQRLINNNWGFRPKRLNFKLFNIQVKEVTQNDGTTTIANNLTSTVQVFTDSEYQLPYVLGSAHQGCLPPFPADVFMVPQYGYLTLNNGSQAVGRSSFYCLEYFPSQMLRTGNNFTFSYTFEDVPFHSSYAHSQSLDRLMNPLIDQYLYYLSRTNTPSGTTTQSRLQFSQAGASDIRDQSRNWLPGPCYRQQRVSKTSADNNNSEYSWTGATKYHLNGRDSLVNPGPAMASHKDDEEKFFPQSGVLIFGKQGSEKTNVDIEKVMITDEEEIRTTNPVATEQYGSVSTNLQRGNRQAATADVNTQGVLPGMVWQDRDVYLQGPIWAKIPHTDGHFHPSPLMGGFGLKHPPPQILIKNTPVPANPSTTFSAAKFASFITQYSTGQVSVEIEWELQKENSKRWNPEIQYTSNYNKSVNVDFTVDTNGVYSEPRPIGTRYLTRNL

SEQ ID NO: 12665 - protein, 735 aa, Artificial Sequence
  source: /note="Description of Artificial Sequence: Synthetic polypeptide"
MAADGYLPDWLEDTLSEGIRQWWKLKPGPPPPKPAERHKDDSRGLVLPGYKYLGPFNGLDKGEPVNEADAAALEHDKAYDRQLDSGDNPYLKYNHADAEFQERLKEDTSFGGNLGRAVFQAKKRVLEPLGLVEEPVKTAPGKKRPVEHSPVEPDSSSGTGKAGQQPARKRLNFGQTGDADSVPDPQPLGQPPAAPSGLGTNTMATGSGAPMADNNEGADGVGNSSGNWHCDSTWMGDRVITTSTRTWALPTYNNHLYKQISSQSGASNDNHYFGYSTPWGYFDFNRFHCHFSPRDWQRLINNNWGFRPKRLNFKLFNIQVKEVTQNDGTTTIANNLTSTVQVFTDSEYQLPYVLGSAHQGCLPPFPADVFMVPQYGYLTLNNGSQAVGRSSFYCLEYFPSQMLRTGNNFTFSYTFEDVPFHSSYAHSQSLDRLMNPLIDQYLYYLSRTNTPSGTTTQSRLQFSQAGASDIRDQSRNWLPGPCYRQQRVSKTSADNNNSEYSWTGATKYHLNGRDSLVNPGPAMASHKDDEEKFFPQSGVLIFGKQGSEKTNVDIERVMITDEEEIRTTNPVATEQYGSVSTNLQRGNRQAATADVNTQGVLPGMVWQDRDVYLQGPIWAKIPHTDGHFHPSPLMGGFGLKHPPPQILIKNTPVPANPSTTFSAAKFASFITQYSTGQVSVEIEWELQKENSKRWNPEIQYTSNYNKSVNVDFTVDTNGVYSEPRPIGTRYLTRNL

SEQ ID NO: 12666 - protein, 735 aa, Artificial Sequence
  source: /note="Description of Artificial Sequence: Synthetic polypeptide"
MAADGYLPDWLEDTLSEGIRQWWKLKPGPPPPKPAERHKDDSRGLVLPGYKYLGPFNGLDKGEPVNEADAAALEHDKAYDRQLDSGDNPYLKYNHADAEFQERLKEDTSFGGNLGRAVFQAKKRVLEPLGLVEEPVKTAPGKKRPVEHSPVEPDSSSGTGKAGQQPARKRLNFGQTGDADSVPDPQPLGQPPAAPSGLGTNTMATGSGAPMADNNEGADGVGNSSGNWHCDSTWMGDRVITTSTRTWALPTYNNHLYKQISSQSGASNDNHCFGYSTPWGYFDFNRFHCHFSPRDWQRLINNNWGFRPKRLNFKLFNIQVKEVTQNDGTTTIANNLTSTVQVFTDSEYQLPYVLGSAHQGCLPPFPADVFMVPQYGYLTLNNGSQAVGRSSFYCLEYFPSQMLRTGNNFTFSYTFEDVPFHSSYAHSQSLDRLMNPLIDQYLYYLSRTNTPSGTTTQSRLQFSQAGASDIRDQSRNWLPGPCYRQQRVSKTSADNNNSEYSWTGATKYHLNGRDSLVNPGPAMASHKDDEEKFFPQSGVLIFGKQGSEKTNVDIEKVMITDEEEIRTTNPVATEQYGSVSTNLQRGNRQAATADVNTQGVLPGMVWQDRDVYLQGPIWAKIPHTDGHFHPSPLMGGFGLKHPPPQILIKNTPVPANPSTTFSAAKFASFITQYSTGQVSVEIEWELQKENSKRWNPEIQYTSNYNKSVNVDFTVDTNGVYSEPRPIGTRYLTRNL

SEQ ID NO: 12667 - protein, 735 aa, Artificial Sequence
  source: /note="Description of Artificial Sequence: Synthetic polypeptide"
MAADGYLPDWLEDTLSEGIRQWWKLKPGPPPPKPAERHKDDSRGLVLPGYKYLGPFNGLDKGEPVNEADAAALEHDKAYDRQLDSGDNPYLKYNHADAEFQERLKEDTSFGGNLGRAVFQAKKRVLEPLGLVEEPVKTAPGKKRPVEHSPVEPDSSSGTGKAGQQPARKRLNFGQTGDADSVPDPQPLGQPPAAPSGLGTNTMATGSGAPMADNNEGADGVGNSSGNWHCDSTWMGDRVITTSTRTWALPTYNNHLYKQISSQSGASNDNHYFGYSTPWGYFDFNRFHCHFSPRDWQRLINNNWGFRPKRLNFKLFNIQVKEVTQNDGTTTIANNLTSTVQVFTDSEYQLPYVLGSAHQGCLPPFPADVFMVPQYGYLTLNNGSQAVGRSSFYCLEYFPSQMLRTGNNFTFSYTFEDVPFHSSYAHSQSLDRLMNPLIDQYLYYLSRTNTPSGTTTQSRLQFSQAGASDIRDQSRNWLPGPCYRQQRVSKTSADNNNSEYSWTGATKYHLNGRDSLVNPGPAMASHKDDEEKFFPQSGVLIFGKQGSEKTNVDIEKVMITDEEEIRTTNPVATEQYGSVSTNLQRGNRQAATADVNTQGVLPGMVWQDRDVYLQGPIWAKIPHTDGHFHPSPLMGGFGLKHPPPQILIKNTPVPANPSTTFSAAKFASFITQYSTGQVSVEIEWELQKENSKRWNPEIQYTSNYNKSVNADFTVDTNGVYSEPRPIGTRYLTRNL

SEQ ID NO: 12668 - protein, 735 aa, Artificial Sequence
  source: /note="Description of Artificial Sequence: Synthetic polypeptide"
MAADGYLPDWLEDTLSEGIRQWWKLKPGPPPPKPAERHRDDSRGLVLPGYKYLGPFNGLDKGEPVNEADAAALEHDKAYDRQLDSGDNPYLKYNHADAEFQERLKEDTSFGGNLGRAVFQAKKRVLEPLGLVEEPVKTAPGKKRPVEHSPVEPDSSSGTGKAGQQPARKRLNFGQTGDADSVPDPQPLGQPPAAPSGLGTNTMATGSGAPMADNNEGADGVGNSSGNWHCDSTWMGDRVITTSTRTWALPTYNNHLYKQISSQSGASNGNHYFGYSTPWGYFDFNRFHCHFSPRDWQRLINNNWGFRPKRLNFKLFNIQVKEVTQNDGTTTIANNLTSTVQVFTDSEYQLPYVLGSAHQGCLPPFPADVFMVPQYGYLTLNNGSQAVGRSSFYCLEYFPSQMLRTGNNFTFSYTFEDVPFHSSYAHSQSLDRLMNPLIDQYLYYLSRTNTPSGTTTQSRLQFSQAGASDIRDQSRNWLPGPCYRQQRVSKTSADNNNSEYSWTGATKYHLNGRDSLVNPGPAMASHKDDEEKFFPQSGVLIFGKQGSEKTNVDIEKVMITDEEEIRTTNPVATEQYGSVSTNLQRGNRQAATADVNTQGVLPGMVWQDRDVYLQGPIWAKIPHTDGHFHPSPLMGGFGLKHPPPQILIKNTPVPANPSTTFSAAKFASFITQYSTGQVSVEIEWELQKENSKRWNPEIQYTSNYNKSVNVDFTVDTNGVYSEPRPIGTRYLTRNL

SEQ ID NO: 12669 - protein, 735 aa, Artificial Sequence
  source: /note="Description of Artificial Sequence: Synthetic polypeptide"
MAADGYLPDWLEDTLSEGIRQWWKLKPGPPPPKPAERHKDDSRGLVLPGYKYLGPFNGLDKGEPVNEADAAALEHDKAYDRQLDSGDNPYLKYNHADAEFQERLKEDTSFGGNLGRAVFQAKKRVLEPLGLVEEPVKTAPGKKRPVEHSPVEPDSSSGTGKAGQQPARKRLNFGQTGDADSVPDPQPLGQPPAAPSGLGTNTMATGSGAPMADNNEGADGVGNSSGNWHCDSTWMGDRVITTSTRTWALPTYNNHLYKQISSQSGASNDNHYFGYSTPWGYFDFNRFHCHFSPRDWQRLINNNWGFRPKRLNFKLFNIQVKEVTQNDGTTTIANNLTSTVQVFTDSEYQLPYVLGSAHQGCLPPFPADVFMVPQYGYLTLNNGSRAVGRSSFYCLEYFPSQMLRTGNNFTFSYTFEDVPFHSSYAHSQSLDRLMNPLIDQYLYYLSRTNTPSGTTTQSRLQFSQAGASDIRDQSRNWLPGPCYRQQRVSKASADNNNSEYSWTGATKYHLNGRDSLVNPGPAMASHKDDEEKFFPQSGVLIFGKQGSEKTNVDIEKVMITDEEEIRTTNPVATEQYGSVSTNLQRGNRQAATADVNTQGVLPGMVWQDRDVYLQGPIWAKIPHTDGHFHPSPLMGGFGLKHPPPQILIKNTPVPANPSTTFSAAKFASFITQYSTGQVSVEIEWELQKENSKRWNPEIQYTSNYNKSVNVDFTVDTNGVYSEPRPIGTRYLTRNL

SEQ ID NO: 12670 - protein, 735 aa, Artificial Sequence
  source: /note="Description of Artificial Sequence: Synthetic polypeptide"
MAADGYLPDWLEDTLSEGIRQWWKLKPGPPPPKPAERHRDDSRGLVLPGYKYLGPFNGLDKGEPVNEADAAALEHDKAYDRQLDSGDNPYLKYNHADAEFQERLKEDTSFGGNLGRAVFQAKKRVLEPLGLVEEPVKTAPGKKRPVEHSPVEPDSSSGTGKAGQQPARKRLNFGQTGDADSVPDPQPLGQPPAAPSGLGTNTMATGSGAPMADNNEGADGVGNSSGNWHCDSTWMGDRVITTSTRTWALPTYNNHLYKQISSQSGASNGNHYFGYSTPWGYFDFNRFHCHFSPRDWQRLINNNWGFRPKRLNFKLFNIQVKEVTQNDGTTTIANNLTSTVQVFTDSEYQLPYVLGSAHQGCLPPFPADVFMVPQYGYLTLNNGSQAVGRSSFYCLEYFPSQMLRTGNNFTFSYTFEDVPFHSSYAHSQSLDRLMNPLIDQYLYYLSRTNTPSGTTTQSRLQFSQAGASGIRDQSRNWLPGPCYRQQRVSKTSADNNNSEYSWTGATKYHLNGRDSLVNPGPAMASHKDDEEKFFPQSGVLIFGKQGSEKTNVDIEKVMITDEEEIRTTNPVATEQYGSVSTNLQRGNRQAATADVNTQGVLPGMVWQDRDVYLQGPIWAKIPHTDGHFHPSPLMGGFGLKHPPPQILIKNTPVPANPSTTFSAAKFASFITQYSTGQVSVEIEWELQKENSKRWNPEIQYTSNYNKSVNVDFTVDTNGVYSEPRPIGTRYLTRNL

SEQ ID NO: 12671 - protein, 735 aa, Artificial Sequence
  source: /note="Description of Artificial Sequence: Synthetic polypeptide"
MAADGYLPDWLEDTLSEGIRQWWKLKPGPPPPKPAERHRDDSRGLVLPGYKYLGPFNGLDKGEPVNEADAAALEHDKAYDRQLDSGDNPYLKYNHADAEFQERLKEDTSFGGNLGRAVFQAKKRVLEPLGLVEEPVKTAPGKKRPVEHSPVEPDSSSGTGKAGQQPARKRLNFGQTGDADSVPDPQPLGQPPAAPSGLGTNTMATGSGAPMADNNEGADGVGNSSGNWHCDSTWMGDRVITTSTRTWALPTYNNHLYKQISSQSGASNGNHYFGYSTPWGYFDFNRFHCHFSPRDWQRLINNNWGFRPKRLNFKLFNIQVKEVTQNDGTTTIANNLTSTVQVFTDSEYQLPYVLGSAHQGCLPPFPADVFMVPQYGYLTLNNGSQAVGRSSFYCLEYFPSQMLRTGNNFTFSYTFEDVPFHSNYAHSQSLDRLMNPLIDQYLYYLSRTNTPSGTTTQSRLQFSQAGASDIRDQSRNWLPGPCYRQQRVSKTSADNNNSEYSWTGATKYHLNGRDSLVNPGPAMASHKDDEEKFFPQSGVLIFGKQGSEKTNVDIEKVMITDEEEIRTTNPVATEQYGSVSTNLQRGNRQAATADVNTQGVLPGMVWQDRDVYLQGPIWAKIPHTDGHFHPSPLMGGFGLKHPPPQILIKNTPVPANPSTTFSAAKFASFITQYSTGQVSVEIEWELQKENSKRWNPEIQYTSNYNKSVNVDFTVDTNGVYSEPRPIGTRYLTRNL

SEQ ID NO: 12672 - protein, 735 aa, Artificial Sequence
  source: /note="Description of Artificial Sequence: Synthetic polypeptide"
MAADGYLPDWLEDTLSEGIRQWWKLKPGPPPPKPAERHKDDSRGLVLPGYKYLGPFNGLDKGEPVNEADAAALEHDKAYDRQLDSGDNPYLKYNHADAEFQERLKEDTSFGGNLGRAVFQAKKRVLEPLGLVEEPVKTAPGKKRPVEHSPVEPDSSSGTGKAGQQPARKRLNFGQTGDADSVPDPQPLGQPPAAPSGLGTNTMATGSGAPMADNNEGADGVGNSSGNWHCDSTWMGDRVITTSTRTWALPTYNNHLYKQISSQSGASNDNHYFGYSTPWGYFDFNRFHCHFSPRDWQRLINNNWGFRPKRLNFKLFNIQVKEVTQNDGTTTIANNLTSTVQVFTDSEYQLPYVLGSAHQGCLPPFPADVFMVPQYGYLTLNNGSQAVGRSSFYCLEYFPSQMLRTGNNFTFSYTFEDVPFHSSYAHSQSLDRLMNPLIDQYLYYLSRTNTPSGTTTQSRLQFSQAGASDIRDQSRNWLPGPCYRQQRVSKTSADNNNSEYSWTGATKYHLNGRDSLVNPGPAMASHKDDEEKFFPQSGVLIFGKQGSEKTNVDIEKVMITDEEEIRTTNPVATEQYGSVSTNLQRGNRQAATADVNTQGVLPGMVWQDRDVYLQGPIWAKIPHTDGHFHPSPLMGGFGLKHPPPQILIKNTPVPANPSTTFSAAKFASFITQYSAGQVSVEIEWELQKENSKRWNPEIQYTSNYNKSVNVDFTVDTNGVYSEPRPIGTRYLTRNL

SEQ ID NO: 12673 - protein, 735 aa, Artificial Sequence
  source: /note="Description of Artificial Sequence: Synthetic polypeptide"
MAADGYLPDWLEDTLSEGIRQWWKLKPGPPPPKPAERHKDDSRGLVLPGYKYLGPFNGLDKGEPVNEADAAALEHDKAYDRQLDSGDNPYLKYNHADAEFQERLKEDTSFGGNLGRAVFQAKKRVLEPLGLVEEPVKTAPGKKRPVEHSPVEPDSSSGTGKAGQQPARKRLNFGQTGDADSVPDPQPLGQPPAAPSGLGTNTMATGSGAPMADNNEGADGVGNSSGNWHCDSTWMGDRVITTSTRTWALPTYNNHLYKQISSQSGASNDNHYFGYSTPWGYFDFNRFHCHFSPRDWQRLINNNWGFRPKRLNFKLFNIQVKEVTQNDGTTTIANNLTSTVQVFTDSEYQLPYVLGSAHQGCLPPFPADVFMVPQYGYLTLNNGSQAVGRSSFYCLEYFPSQMLRTGNNFTFSYTFEDVPFHSSYAHSQSLDRLMNPLIDQYLYYLSRTNTPSGTTTQSRLQFSQAGASDIRDQSRNWLPGPCYRQQRVSKTSADNNNSEYSWTGATKYHLNGRDSLVNPGPAMASHKDDEEKFFPQSGVLIFGKQGSEKTNVDIEKVMITDEEEIRTTNPVATEQYGSVSTNLQRGNRQAATADVNTQGVLPGMVWQDRDVYLQGPIWAKIPHTDGHFHPSPLMGGFGLKHPPPQILIKNTPVPANPSTTFSAAKFASFITQYSTGQVSVEIEWELQKENSKRWNPEIQYTSNYNKSVNVDFTVDTDGVYSEPRPIGTRYLTRNL

SEQ ID NO: 12674 - protein, 735 aa, Artificial Sequence
  source: /note="Description of Artificial Sequence: Synthetic polypeptide"
MAADGYLPDWLEDTLSEGIRQWWKLKPGPPPPKPAERHKDDSRGLVLPGYKYLGPFNGLDKGEPVNEADAAALEHDKAYDRQLDSGDNPYLKYNHADAEFQERLKEDTSFGGNLGRAVFQAKKRVLEPLGLVEEPVKTAPGKKRPVEHSPVEPDSSSGTGKAGQQPARKRLNFGQTGDADSVPDPQPLGQPPAAPSGLGTNTMATGSGAPMADNNEGADGVGNSSGNWHCDSTWMGDRVITTSTRTWALPTYNNHLYKQISSQSGASNDNHYFGYSTPWGYFDFNRFHCHFSPRDWQRLINNNWGFRPKRLNFKLFNIQVKEVTQNDGTTTIANNLTSTVQVFTDSEYQLPYVLGSAHQGCLPPFPADVFMVPQYGYLTLNNGSQAVGRSSFYCLEYFPSQMLRTGNNFTFSYTFEDVPFHSSYAHSQSLDRLMNPLIDQYLYYLSRTNTPSGTTTQSRLQFSQAGASDIRDQSRNWLPGPCYRQQRVSKTSADNNNSEYSWTGATKYHLNGRDSLVNPGPAMASHKDDEEKFFPQSGVLIFGKQGSEKTNVDIEKVMITDEEEIRTTNPVATEQYGSVSTNLQRGNRQAATADVNTQGVLPGMVWQGRDVYLQGPIWAKIPHTDGHFHPSPLMGGFGLKHPPPQILIKNTPVPANPSTTFSAAKFASFITQYSTGQVSVEIEWELQKENSKRWNPEIQYTSNYNKSVNVDFTVDTNGVYSEPRPIGTRYLTRNL

SEQ ID NO: 12675 - protein, 735 aa, Artificial Sequence
  source: /note="Description of Artificial Sequence: Synthetic polypeptide"
MAADGYLPDWLEDTLSEGIRQWWKLKPGPPPPKPAERHKDDSRGLVLPGYKYLGPFNGLDKGEPVNEADAAALEHDKAYDRQLDSGDNPYLKYNHADAEFQERLKEDTSFGGNLGRAVFQAKKRVLEPLGLVEEPVKTAPGKKGPVEHSPVEPDSSSGTGKAGQQPARKRLNFGQTGDADSVPDPQPLGQPPAAPSGLGTNTMATGSGAPMADNNEGADGVGNSSGNWHCDSTWMGDRVITTSTRTWALPTYNNHLYKQISSQSGASNDNHYFGYSTPWGYFDFNRFHCHFSPRDWQRLINNNWGFRPKRLNFKLFNIQVKEVTQNDGTTTIANNLTSTVQVFTDSEYQLPYVLGSAHQGCLPPFPADVFMVPQYGYLTLNNGSQAVGRSSFYCLEYFPSQMLRTGNNFTFSYTFEDVPFHSSYAHSQSLDRLMNPLIDQYLYYLSRTNTPSGTTTQSRLQFSQAGASDIRDQSRNWLPGPCYRQQRVSKTSADNNNSEYSWTGATKYHLNGRDSLVNPGPAMAGHKDDEEKFFPQSGVLIFGKQGSEKTNVDIEKVMITDEEEIRTTNPVATEQYGSVSTNLQRGNRQAATADVNTQGVLPGMVWQDRDVYLQGPIWAKIPHTDGHFHPSPLMGGFGLKHPPPQILIKNTPVPANPSTTFSAAKFASFITQYSTGQVSVEIEWELQKENSKRWNPEIQYTSNYNKSVNVDFTVDTNGVYSEPRPIGTRYLTRNL

SEQ ID NO: 12676 - protein, 735 aa, Artificial Sequence
  source: /note="Description of Artificial Sequence: Synthetic polypeptide"
MAADGYLPDWLEDTLSEGIRQWWKLKPGPPPPKPAERHKDDSRGLVLPGYKYLGPFNGLDKGEPVNEADAAALEHDKAYDRQLDSGDNPYLKYNHADAEFQERLKEDTSFGGNLGRAVFQAKKRVLEPLGLVEEPVKTAPGKKRLVEHSPVEPDSSSGTGKAGQQPARKRLNFGQTGDADSVPDPQPLGQPPAAPSGLGTNTMATGSGAPMADNNEGADGVGNSSGNWHCDSTWMGDRVITTSTRTWALPTYNNHLYKQISSQSGASNDNHYFGYSTPWGYFDFNRFHCHFSPRDWQRLINNNWGFRPKRLNFKLFNIQVKEVTQNDGTTTIANNLTSTVQVFTDSEYQLPYVLGSAHQGCLPPFPADVFMVPQYGYLTLNNGSQAVGRSSFYCLEYFPSQMLRTGNNFTFSYTFEDVPFHSSYAHSQSLDRLMNPLIDQYLYYLSRTNTPSGTTTQSRLQFSQAGASDIRDQSRNWLPGPCYRQQRVSKTSADNNNSEYSWTGATKYHLNGRDSLVNPGPAMASHKDDEEKFFPQSGVLIFGKQGSEKTNVDIEKVMITDEEEIRTTNPVATEQYGSVSTNLQRGNRQAATADVNTQGVLPGMVWQDRDVYLQGPIWAKIPHTDGHFHPSPLMGGFGLKHPPPQILIKNTPVPANPSTTFSAAKFASFITQYSTGQVSVEIEWELQKENSKRWNPEIQYTSNYNKSVNVDFTVDTNGVYSEPRPIGTRYLTRNL

SEQ ID NO: 12677 - protein, 735 aa, Artificial Sequence
  source: /note="Description of Artificial Sequence: Synthetic polypeptide"
MAADGYLPDWLEDTLSEGIRQWWKLKPGPPPPKPAERHKDDSRGLVLPGYKYLGPFNGLDKGEPVNEAGAAALKHDKAYDRQLDSGDNPYLKYNHADAEFQERLKEDTSFGGNLGRAVFQAKKRVLEPLGLVEEPVKTAPGKKRPVEHSPVEPDSSSGTGKAGQQPARKRLNFGQTGDADSVPDPQPLGQPPAAPSGLGTNTMATGSGAPMADNNEGADGVGNSSGNWHCDSTWMGDRVITTSTRTWALPTYNNHLYKQISSQSGASNDNHYFGYSTPWGYFDFNRFHCHFSPRDWQRLINNNWGFRPKRLNFKLFNIQVKEVTQNDGTTTIANNLTSTVQVFTDSEYQLPYVLGSAHQGCLPPFPADVFMVPQYGYLTLNNGSQAVGRSSFYCLEYFPSQMLRTGNNFTFSYTFEDVPFHSSYAHSQSLDRLMNPLIDQYLYYLSRTNTPSGTTTQSRLQFSQAGASDIRDQSRNWLPGPCYRQQRVSKTSADNNNSEYSWTGATKYHLNGRDSLVNPGPAMASHKDDEEKFFPQSGVLIFGKQGSEKTNVDIEKVMITDEEEIRTTNPVATEQYGSVSTNLQRGNRQAATADVNTQGVLPGMVWQDRDVYLQGPIWAKIPHTDGHFHPSPLMGGFGLKHPPPQILIKNTPVPANPSTTFSAAKFASFITQYSTGQVSVEIEWELQKENSKRWNPEIQYTSNYNKSVNVDFTVDTNGVYSEPRPIGTRYLTRNL

SEQ ID NO: 12678 - protein, 735 aa, Artificial Sequence
  source: /note="Description of Artificial Sequence: Synthetic polypeptide"
MAADGYLPDWLEDTLSEGIRQWWKLKPGPPPPKPAERHKDDSRGLVLPGYKYLGPFNGLDKGEPVNEADAAALEHDKAYDRQLDSGDNPYLKYNHADAEFQERLKEDTSFGGNLGRAVFQAKKRVLEPLGLVEEPVKTAPGKKRPVEHSPVEPDSSSGTGKAGQQPARKRLNFGQTGDADSVPDPQPLGQPPAAPSGLGTNTMATGSGAPMADNNEGADGVGNSSGNWHCDSTWMGDRVITTSTRTWALPTYNNHLYKQISSQSGASNDNHYFGYSTPWGYFDFNRFHCHFSPRDWQRLINNNWGFRPKRLNFKLFNIQVKEVTQNDGTTTIANNLTSTVQVFTDSEYQLPYVLGSAHQGCLPPFPADVFMVPQYGYLTLNNGSQAVGRSSFYCLEYFPSQMLRTGNNFTFSYTFEDVPFHSSYAHSQSLDRLMNPLIDQYLYYLSRTNTPSGTTTQSRLQFSQAGASGIRDQSRNWLPGPCYRQQRVSKTSADNNNSEYSWTGATKYHLNGRDSLVNPGPAMASHKDDEEKFFPQSGVLIFGKQGSEKTNVDIEKVMITDEEEIRTTNPVATEQYGSVSTNLQRGNRQAATADVNTQGVLPGMVWQDRDVYLQGPIWAKIPHTDGHFHPSPLMGGFGLKHPPPQILIKNTPVPANPSTTFSAAKFASFITQYSTGQVSVEIEWELQKENSKRWNPEIQYTSNYNKSVNVDFTVDTNGVYSEPRPIGTRYLTRNL

SEQ ID NO: 12679 - protein, 735 aa, Artificial Sequence
  source: /note="Description of Artificial Sequence: Synthetic polypeptide"
MAADGYLPDWLEDTLSEGIRQWWKLKPGPPPPKPAERHKDDSRGLVLPGYKYLGPFNGLDKGEPVNEADAAALEHDKAYDRQLDSGDNPYLKYNHADAEFQERLKEDTSFGGNLGRAVFQAKKRVLEPLGLVEEPVKTAPGKKRPVEHSPVEPDSSSGTGKAGQQPARKRLNFGQTGDADSVPDPQPLGQPPAAPSGLGTNTMATGSGAPMADNNEGADGVGNSSGNWHCDSTWMGDRVITTSTRTWALPTYNNHLYKQISSQSGASNDNHYFGYSTPWGYFDFNRFHCHFSPRDWQRLINNNWGFRPKRLNFKLFNIQVKEVTQNDGTTTIANNLTSTVQVFTDSEYQLPYVLGSAHQGCLPPFPADVFMVPQYGYLTLNNGSQAVGRSSFYCLEYFPSQMLRTGNNFTFSYTFEDVPFHSSYAHSQSLDRLMNPLIDQYLYYLSRANTPSGTTTQSRLQFSQAGASDIRDQSRNWLPGPCYRQQRVSKTSADNNNSEYSWTGATKYHLNGRDSLVNPGPAMASHKDDEEKFFPQSGVLIFGKQGSEKTNVDIEKVMITDEEEIRTTNPVATEQYGSVSTNLQRGNRQAATADVNTQGVLPGMVWQDRDVYLQGPIWAKIPHTDGHFHPSPLMGGFGLKHPPPQILIKNTPVPANPSTTFSAAKFASFITQYSTGQVSVEIEWELQKENSKRWNPEIQYTSNYNKSVNVDFTVDTNGVYSEPRPIGTRYLTRNL

SEQ ID NO: 12680 - protein, 735 aa, Artificial Sequence
  source: /note="Description of Artificial Sequence: Synthetic polypeptide"
MAADGYLPDWLEDTLSEGIRQWWKLKPGPPPPKPAERHKDDSRGLVLPGYKYLGPFNGLDKGEPVNEADAAALEHDKAYDRQLDSGDNPYLKYNHADAEFQERLKEDTSFGGNLGRAVFQAKKRVLEPLGLVEEPVKTAPGKKRPVEHSPVEPDSSSGTGKAGQQPARKRLNFGQTGDADSVPDPQPLGQPPAAPSGLGTNTMATGSGAPMADNNEGADGVGNSSGNWHCDSTWMGDRVITTSTRTRALPTYNNHLYKQISSQSGASNDNHYFGYSTPWGYFDFNRFHCHFSPRDWQRLINNNWGFRPKRLNFKLFNIQVKEVTQNDGTTTIANNLTSTVQVFTDSEYQLPYVLGSAHQGCLPPFPADVFMVPQYGYLTLNNGSQAVGRSSFYCLEYFPSQMLRTGNNFTFSYTFEDVPFHSSYAHSQSLDRLMNPLIDQYLYYLSRTNTPSGTTTQSRLQFSQAGASDIRDQSRNWLPGPCYRQQRVSKTSADNNNSEYSWTGATKYHLNGRDSLVNPGPAMASHKDDEEKFFPQSGVLIFGKQGSEKTNVDIEKVMITDEEEIRTTNPVATEQYGSVSTNLQRGNRQAATADVNTQGVLPGMVWQDRDVYLQGPIWAKIPHTDGHFHPSPLMGGFGLKHPPPQILIKNTPVPANPSTTFSAAKFASFITQYSTGQVSVEIEWELQKENSKRWNPEIQYTSNYNKSVNVDFTVDTNGVYSEPRPIGTRYLTRNL

SEQ ID NO: 12681 - protein, 735 aa, Artificial Sequence
  source: /note="Description of Artificial Sequence: Synthetic polypeptide"
MAADGYLPDWLEDTLSEGIRQWWKLKPGPPPPKPAERHKDDSRGLVLPGYKYLGPFNGLDKGEPVNEADAAALEHDKAYDRQLDSGDNPYLKYNHADAEFQERLKEDTSFGGNLGRAVFQAKKRVLEPLGLVEEPVKTAPGKKRPVEHSPVEPDSSSGTGKAGQQPARKRLNFGQTGDADSVPDPQPLGQPPAAPSGLGTNTMATGSGAPMADNNEGADGVGNSSGNWHCDSTWMGDRVITTSTRTWALPTYNSHLYKQISSQSGASNDNHYFGYSTPWGYFDFNRFHCHFSPRDWQRLINNNWGFRPKRLNFKLFNIQVKEVTQNDGTTTIANNLTSTVQVFTDSEYQLPYVLGSAHQGCLPPFPADVFMVPQYGYLTLNNGSQAVGRSSFYCLEYFPSQMLRTGNNFTFSYTFEDVPFHSSYAHSQSLDRLMNPLIDQYLYYLSRTNTPSGTTTQSRLQFSQAGASDIRDQSRNWLPGPCYRQQRVSKTSADNNNSEYSWTGATKYHLNGRDSLVNPGPAMASHKDDEEKFFPQSGVLIFGKQGSEKTNVDIEKVMITDEEEIRTTNPVATEQYGSVSTNLQRGNRQAATADVNTQGVLPGMVWQDRDVYLQGPIWAKIPHTDGHFHPSPLMGGFGLKHPPPQILIKNTPVPANPSTTFSAAKFASFITQYSTGQVSVEIEWELQKENSKRWNPEIQYTSNYNKSVNVDFTVDTNGVYSEPRPIGTRYLTRNL

SEQ ID NO: 12682 - protein, 735 aa, Artificial Sequence
  source: /note="Description of Artificial Sequence: Synthetic polypeptide"
MAADGYLPDWLEDTLSEGIRQWWKLKPGPPPPKPAERHKDDSRGLVLPGYKYLGPFNGLDKGEPVNEADAAALEHDKAYDRQLDSGDNPYLKYNHADAEFQERLKEDTSFGGNLGRAVFQAKKRVLEPLGLVEEPVKTAPGKKRPVEHSPVEPDSSSGTGKAGQQPARKRLNFGQTGDADSVPDPQPLGQPPAAPSGLGTNTMATGSGAPMADNNEGADGVGNSSGNWHCDSTWMGDRVITTSTRTWALPTYNNHLYKQISSQSGASNDNHYFGYSTPWGYFDFNRFHCHFSPRDWQRLINNNWGFRPKRLNFKLFNIQVKEVTQNDGTTTIANNLTSTVQVFTDSEYQLPYVLGSAHQGCLPPFPADVFMVPQYGYLTLNNGSQAVGRSSFYCLEYFPSQMLRTGNNFTFSYTFEDVPFHSSYAHSQSLDRLMNPLIDQYLYYLSRTNTPSGTTTQSRLQFSQAGASDIRDQSRNWLPGPCYRQQRVSKTSADNNNSEYSWTGATKYHLNGRDSLVNPGPAMASHKDDEEKFFPQSGVLIFGKQGSEKTNVDIEKVMITDEEEIRTTNPVATEQYGSVSTNLQRGNRQAATADVNTQGVLPGMVWQDRDVYLQGPIWAKIPHTDGHFHPSPLMGGFGLKRPPPQILIKNTPVPANPSTTFSAAKFASFITQYSTGQVSVEIEWELQKENSKRWNPEIQYTSNYNKSVNVDFTVDTNGVYSEPRPIGTRYLTRNL

SEQ ID NO: 12683 - protein, 735 aa, Artificial Sequence
  source: /note="Description of Artificial Sequence: Synthetic polypeptide"
MAADGYLPDWLEDTLSEGIRQWWKLKPGPPPPKPAERHKDDSRGLVLPGYKYLGPFNGLDKGEPVNEADAAALEHDKAYDRQLDSGDNPYLKYNHADAEFQERLKEDTSFGGNLGRAVFQAKKRVLEPLGLVEEPVKTAPGKKRPVEHSPVEPDSSSGTGKAGQQPARKRLNFGQTGDADSVPDPQPLGQPPAAPSGLGTNTMATGSGAPMADNNEGADGVGNSSGNWHCDSTWMGDRVITTSTRTWALPTYNNHLYKQISSQSGASNDNHYFGYSTPWGYFDFNRFHCHFSPRDWQRLINNNWGFRPKRLNFKLFNIQVKEVTQNDGTTTIANNLTSTVQVFTDSEYRLPYVLGSAHQGCLPPFPADVFMVPQYGYLTLNNGSQAVGRSSFYCLEYFPSQMLRTGNNFTFSYTFEDVPFHSSYAHSQSLDRLMNPLIDQYLYYLSRTNTPSGTTTQSRLQFSQAGASDIRDQSRNWLPGPCYRQQRVSKTSADNNNSEYSWTGATKYHLNGRDSLVNPGPAMASHKDDEEKFFPQSGVLIFGKQGSEKTNVDIEKVMITDEEEIRTTNPVATEQYGSVSTNLQRGNRQAATADVNTQGVLPGMVWQDRDVYLQGPIWAKIPHTDGHFHPSPLMGGFGLKHPPPQILIKNTPVPANPSTTFSAAKFASFITQYSTGQVSVEIEWELQKENSKRWNPEIQYTSNYNKSVNVDFTVDTNGVYSEPRPIGTRYLTRNL

SEQ ID NO: 12684 - protein, 735 aa, Artificial Sequence
  source: /note="Description of Artificial Sequence: Synthetic polypeptide"
MAADGYLPDWLEDTLSEGIRQWWKLKPGPPPPKPAERHKDDSRGLVLPGYKYLGPFNGLDKGEPVNEADAAALEHDKAYDRQLDSGDNPYLKYNHADAEFQERLKEDTSFGGNLGRAVFQAKKRVLEPLGLVEEPVKTAPGKKRPVEHSPVEPDSSSGTGKAGQQPARKRLNFGQTGDADSVPDPQPLGQPPAAPSGLGTNTMATGSGAPMADNNEGADGVGNSSGNWHCDSTWMGDRVITTSTRTWALPTYNNHLYKQISSQSGASNDNHYFGYSTPWGYFDFNRFHCHFSPRDWQRLINNNWGFRPKRLNFKLFNIQVKEVTQNDGTTTIANNLTSTVRVFTDSEYQLPYVLGSAHQGCLPPFPADVFMVPQYGYLTLNNGSQAVGRSSFYCLEYFPSQMLRTGNNFTFSYTFEDVPFHSSYAHSQSLDRLMNPLIDQYLYYLSRTNTPSGTTTQSRLQFSQAGASDIRDQSRNWLPGPCYRQQRVSKTSADNNNSEYSWTGATKYHLNGRDSLVNPGPAMASHKDDEEKFFPQSGVLIFGKQGSEKTNVDIEKVMITDEEEIRTTNPVATEQYGSVSTNLQRGNRQAATADVNTQGVLPGMVWQDRDVYLQGPIWAKIPHTDGHFHPSPLMGGFGLKHPPPQILIKNTPVPANPSTTFSAAKFASFITQYSTGQVSVEIEWELQKENSKRWNPEIQYTSNYNKSVNVDFTVDTNGVYSEPRPIGTRYLTRNL

SEQ ID NO: 12685 - protein, 735 aa, Artificial Sequence
  source: /note="Description of Artificial Sequence: Synthetic polypeptide"
MAADGYLPDWLEDTLSEGIRQWWKLKPGPPPPKPAERHRDDSRGLVLPGYKYLGPFNGLDKGEPVNEADAAALEHDKAYDRQLDSGDNPYLKYNHADAEFQERLKEDTSFGGNLGRAVFQAKKRVLEPLGLVEEPVKTAPGKKRPVEHSPVEPDSSSGTGKAGQQPARKRLNFGQTGDADSVPDPQPLGQPPAALSGLGTNTMATGSGAPMADNNEGADGVGNSSGNWHCDSTWMGDRVITTSTRTWALPTYNNHLYKQISSQSGASNGNHYFGYSTPWGYFDFNRFHCHFSPRDWQRLINNNWGFRPKRLNFKLFNIQVKEVTQNDGTTTIANNLTSTVQVFTDSEYQLPYVLGSAHQGCLPPFPADVFMVPQYGYLTLNNGSQAVGRSSFYCLEYFPSQMLRTGNNFTFSYTFEDVPFHSSYAHSQSLDRLMNPLIDQYLYYLSRTNTPSGTTTQSRLQFSQAGASDIRDQSRNWLPGPCYRQQRVSKTSADNNNSEYSWTGATKYHLNGRDSLVNPGPAMASHKDDEEKFFPQSGVLIFGKQGSEKTNVDIEKVMITDEEEIRTTNPVATEQYGSVSTNLQRGNRQAATADVNTQGVLPGMVWQDRDVYLQGPIWAKIPHTDGHFHPSPLMGGFGLKHPPPQILIKNTPVPANPSTTFSAAKFASFITQYSTGQVSVEIEWELQKENSKRWNPEIQYTSNYNKSVNVDFTVDTNGVYSEPRPIGTRYLTRNL

SEQ ID NO: 12686 - protein, 735 aa, Artificial Sequence
  source: /note="Description of Artificial Sequence: Synthetic polypeptide"
MAADGYLPDWLEDTLSEGIRQWWKLKPGPPPPKPAERHRDDSRGLVLPGYKYLGPFNGLDKGEPVNEADAAALEHDKAYDRQLDSGDNPYLKYNHADAEFQERLKEDTSFGGNLGRAVFQAKKRVLEPLGLVGEPVKTAPGKKRPVEHSPVEPDSSSGTGKAGQQPARKRLNFGQTGDADSVPDPQPLGQPPAAPSGLGTNTMATGSGAPMADNNEGADGVGNSSGNWHCDSTWMGDRVITTSTRTWALPTYNNHLYKQISSQSGASNGNHYFGYSTPWGYFDFNRFHCHFSPRDWQRLINNNWGFRPKRLNFKLFNIQVKEVTQNDGTTTIANNLTSTVQVFTDSEYQLPYVLGSAHQGCLPPFPADVFMVPQYGYLTLNNGSQAVGRSSFYCLEYFPSQMLRTGNNFTFSYTFEDVPFHSSYAHSQSLDRLMNPLIDQYLYYLSRTNTPSGTTTQSRLQFSQAGASDIRDQSRNWLPGPCYRQQRVSKTSADNNNSEYSWTGATKYHLNGRDSLVNPGPAMASHKDDEEKFFPQSGVLIFGKQGSEKTNVDIEKVMITDEEEIRTTNPVATEQYGSVSTNLQRGNRQAATADVNTQGVLPGMVWQDRDVYLQGPIWAKIPHTDGHFHPSPLMGGFGLKHPPPQILIKNTPVPANPSTTFSAAKFASFITQYSTGQVSVEIEWELQKENSKRWNPEIQYTSNYNKSVNVDFTVDTNGVYSEPRPIGTRYLTRNL

SEQ ID NO: 12687 - protein, 735 aa, Artificial Sequence
  source: /note="Description of Artificial Sequence: Synthetic polypeptide"
MAADGYLPDWLEDTLSEGIRQWWKLKPGPPPPKPAERHRDDSRGLVLPGYKYLGPFNGLDKGEPVNEADAAALEHDKAYDRQLDSGDNPYLKYNHADAEFQERLKEDTSFGGNLGRAVFQAKKRVLEPLGLVEEPVKTAPGKKRPVEHSPVEPDSSSGTGKAGQQPARKRLNFGQTGDADSVPDPQPLGQPPAAPSGLGTNTMATGSGAPMADNNEGADGVGNSSGNWHYDSAWMGDRVITTSTRTWALPTYNNHLYKQISSQSGASNGNHYFGYSTPWGYFDFNRFHCHFSPRDWQRLINNNWGFRPKRLNFKLFNIQVKEVTQNDGTTTIANNLTSTVQVFTDSEYQLPYVLGSAHQGCLPPFPADVFMVPQYGYLTLNNGSQAVGRSSFYCLEYFPSQMLRTGNNFTFSYTFEDVPFHSSYAHSQSLDRLMNPLIDQYLYYLSRTNTPSGTTTQSRLQFSQAGASDIRDQSRNWLPGPCYRQQRVSKTSADNNNSEYSWTGATKYHLNGRDSLVNPGPAMASHKDDEEKFFPQSGVLIFGKQGSEKTNVDIEKVMITDEEEIRTTNPVATEQYGSVSTNLQRGNRQAATADVNTQGVLPGMVWQDRDVYLQGPIWAKIPHTDGHFHPSPLMGGFGLKHPPPQILIKNTPVPANPSTTFSAAKFASFITQYSTGQVSVEIEWELQKENSKRWNPEIQYTSNYNKSVNVDFTVDTNGVYSEPRPIGTRYLTRNL

SEQ ID NO: 12688 - protein, 735 aa, Artificial Sequence
  source: /note="Description of Artificial Sequence: Synthetic polypeptide"
MAADGYLPDWLEDTLSEGIRQWWKLKPGPPPPKPAERHRDDSRGLVLPGYKYLGPFNGLDKGEPVNEADAAALEHDKAYDRQLDSGDNPYLKYNHADAEFQERLKEDTSFGGNLGRAVFQAKKRVLEPLGLVEEPVKTAPGKKRPVEHSPVEPDSSSGTGKAGQQPARKRLNFGQTGDADSVPDPQPLGQPPAAPSGLGTNTMATGSGAPMADNNEGADGVGNSSGNWHCDSTWMGDRVITTSTRTWALPTYNNHLYKQISSQSGASNGNHYFGYSTPWGYFDFNRFHCHFSPRDWQRLINNNWGFRPKRLNFKLFNIQVKEVTQNDGTTTIANNLTSTVQVFTDSEYQLPYVLGSAHQGCLPPFPADVFMVPQYGYLTLNNGSQAVGRSSFYCLEYFPSQMLRTGNNFTFSYTFEDVPFHSSYAHSQSLDRLMNPLIDQYLYYLSRTNTPSGTTTQSRLQFSQAGASDIRDQSRNWLPGPCYRQQRVSKTSADNNNSEYSWTGATKYHLNGRDSLVNPGPAMASHKDDEEKFFPQSGVLIFGKQGSEKTNVDIEKVMITDEEEIRTTNPVATEQYGSVSTNLQRGNRQAATADVNTQGVLPGMVWQDRDVYLQGPIWAKIPHTDGHFHPSPLMGGFGLKHPPPQILIKNTPVPANPSTTFSAAKFASFIAQYSTGQVSVEIEWELQKENSKRWNPEIQYTSNYNKSVNVDFTVDTNGVYSEPRPIGTRYLTRNL

SEQ ID NO: 12689 - protein, 735 aa, Artificial Sequence
  source: /note="Description of Artificial Sequence: Synthetic polypeptide"
MAADGYLPDWLEDTLSEGIRQWWKLKPGPPPPKPAERHRDDSRGLVLPGYKYLGPFNGLDKGEPVNEADAAALEHDKAYDRQLDSGDNPYLKYNHADAEFQERLKEDTSFGGNLGRAVFQAKKRVLEPLGLVEEPVKTAPGKKRPVEHSPVEPDSSSGTGKAGQQPARKRLNFGQTGDADSVPDPQPLGQPPAAPSGLGTNTMATGSGAPMADNNEGADGVGNSSGNWHCDSTWMGDRVITTSTRTWALPTYNNHLYKQISSQSGASNGNHYFGYSTPWGYFDFNRFHCHFSPRDWQRLINNNWGFRPKRLNFKLFNIQVKEVTQNDGTTTIANNLTSTVQVFTDSEYQLPYVLGSAHQGCLPPFPADVFMVPQYGYLTLNNGSQAVGRSSFYCLEYFPSQMLRTGNNFTFSYTFEDVPFHSSYAHSQSLDRLMNPLIDQYPYYLSRTNTPSGTTTQSRLQFSQAGASDIRDQSRNWLPGPCYRQQRVSKTSADNNNSEYSWTGATKYHLNGRDSLVNPGPAMASHKDDEEKFFPQSGVLIFGKQGSEKTNVDIEKVMITDEEEIRTTNPVATEQYGSVSTNLQRGNRQAATADVNTQGVLPGMVWQDRDVYLQGPIWAKIPHTDGHFHPSPLMGGFGLKHPPPQILIKNTPVPANPSTTFSAAKFASFITQYSTGQVSVEIEWELQKENSKRWNPEIQYTSNYNKSVNVDFTVDTNGVYSEPRPIGTRYLTRNL

SEQ ID NO: 12690 - protein, 735 aa, Artificial Sequence
  source: /note="Description of Artificial Sequence: Synthetic polypeptide"
MAADGYLPDWLEDTLSEGIRQWWKLKPGPPPPKPAERHRDDSRGLVLPGYKYLGPFNGLDKGEPVNEADAAALEHDKAYDRQLDSGDNPYLKYNHADAEFQERLKEDTSFGGNLGRAVFQAKKRVLEPLGLVEEPVKTAPGKKRPVEHSPVEPDSSSGTGKAGQQPARKRLNFGQTGDADSVPDPQPLGQPPAAPSGLGTNTMATGSGAPMADNNEGADGVGNSSGNWHCDSTWMGDRVITTSTRTWALPTYNNHLYKQISSQSGASNGNHYFGYSTPWGYFDFNRFHCHFSPRDRQRLINNNWGFRPKRLNFKLFNIQVKEVTQNDGTTTIANNLTSTVQVFTDSEYQLPYVLGSAHQGCLPPFPADVFMVPQYGYLTLNNGSQAVGRSSFYCLEYFPSQMLRTGNNFTFSYTFEDVPFHSSYAHSQSLDRLMNPLIDQYLYYLSRTNTPSGTTTQSRLQFSQAGASDIRDQSRNWLPGPCYRQQRVSKTSADNNNSEYSWTGATKYHLNGRDSLVNPGPAMASHKDDEEKFFPQSGVLIFGKQGSEKTNVDIEKVMITDEEEIRTTNPVATEQYGSVSTNLQRGNRQAATADVNTQGVLPGMVWQDRDVYLQGPIWAKIPHTDGHFHPSPLMGGFGLKHPPPQILIKNTPVPANPSTTFSAAKFASFITQYSTGQVSVEIEWELQKENSKRWNPEIQYTSNYNKSVNVDFTVDTNGVYSEPRPIGTRYLTRNL

SEQ ID NO: 12691 - protein, 735 aa, Artificial Sequence
  source: /note="Description of Artificial Sequence: Synthetic polypeptide"
MAADGYLPDWLEDTLSEGIRQWWKLKPGPPPPKPAERHRDDSRGLVLPGYKYLGPFNGLDKGEPVNEADAAALEHDKAYDRQLDSGDNPYLKYNHADAEFQERLKEDTSFGGNLGRAVFQAKKRVLEPLGLVEEPVKTAPGKKRPVEHSPVEPDSSSGTGKAGQQPARKRLNFGQTGDADSVPDPQPLGQPPAAPSGLGTNTMATGSGAPMADNNEGADGVGNSSGNWHCDSTWMGDRVITTSTRTWALPTYNNHLYKQISSQSGASNGNHYFGYSTPWGYFDFNRFHCHFSPRDWQRLINNNWGFRPKRLNFKLFNIQVKEVTQNDGTTTIANNLTSTVQVFTDSEYQLPYVLGSAHQGCLPPFPADVFMVPQYGYLTLNNGSQAVGRSSFYCLEYFPSQMLRTGNNFTFSYTFEDVPFHSSYAHSQSLDRLMNPLIDQYLYYLSRTNTPSGTTTQSRLQFSQAGASDIRDQSRNWLPGPCYRQQRVSKTSADNNNSEYSWTGATKYHLNGRDSLVNPGPAMASHKDDEEKFFPQSGVLIFGKQGSEKTNVDIEKVMITDEEEIRTTNPVATEQYGSVSTNLQRGNRQAATADVNTQGVLPGMVWQDRDVYLQGPIWAKIPHTDGHFHPSPLMGGFGLKHPPPQILIKNTPVPANPSTTFSAAKFASFITQYSTGQVSVEIEWELQKENSKRWNPEIQYTSNYNKSVNVDLTVDTNGVYSEPRPIGTRYLTRNL

SEQ ID NO: 12692 - protein, 735 aa, Artificial Sequence
  source: /note="Description of Artificial Sequence: Synthetic polypeptide"
MAADGYLPDWLEDTLSEGIRQWWKLKPGPPPPKPAERHRDDSRGLALPGYKYLGPFNGLDKGEPVNEADAAALEHDKAYDRQLDSGDNPYLKYNHADAEFQERLKEDTSFGGNLGRAVFQAKKRVLEPLGLVEEPVKTAPGKKRPVEHSPVEPDSSSGTGKAGQQPARKRLNFGQTGDADSVPDPQPLGQPPAAPSGLGTNTMATGSGAPMADNNEGADGVGNSSGNWHCDSTWMGDRVITTSTRTWALPTYNNHLYKQISSQSGASNGNHYFGYSTPWGYFDFNRFHCHFSPRDWQRLINNNWGFRPKRLNFKLFNIQVKEVTQNDGTTTIANNLTSTVQVFTDSEYQLPYVLGSAHQGCLPPFPADVFMVPQYGYLTLNNGSQAVGRSSFYCLEYFPSQMLRTGNNFTFSYTFEDVPFHSSYAHSQSLDRLMNPLIDQYLYYLSRTNTPSGTTTQSRLQFSQAGASDIRDQSRNWLPGPCYRQQRVSKTSADNNNSEYSWTGATKYHLNGRDSLVNPGPAMASHKDDEEKFFPQSGVLIFGKQGSEKTNVDIEKVMITDEEEIRTTNPVATEQYGSVSTNLQRGNRQAATADVNTQGVLPGMVWQDRDVYLQGPIWAKIPHTDGHFHPSPLMGGFGLKHPPPQILIKNTPVPANPSTTFSAAKFASFITQYSTGQVSVEIEWELQKENSKRWNPEIQYTSNYNKSVNVDFTVDTNGVYSEPRPIGTRYLTRNL

SEQ ID NO: 12693 - protein, 735 aa, Artificial Sequence
  source: /note="Description of Artificial Sequence: Synthetic polypeptide"
MAADGYLPDWLEDTLSEGIRQWWKLKPGPPPPKPAERHRDDSRGLVLPGYKYLGPFNGLDKGEPVNEADAAALEHDKAYDRQLDSGDNPYLKYNHADAEFQERLKEDTSFGGNLGRAVFQAKKRVLEPLGLVEEPVKTAPGKKRPVEHSPVEPDSSSGTGKAGQQPARKRLNFGQTGDADSVPDPQPLGQPPAAPSGLGTNTMATGSGAPMADNNEGADGVGNSSGNWHCDSTWMGDRVITTSTRTWALPTYNNHLYKQISSQSGASNGNHYFGYSTPWGYFDFNRFHCHFSPRDWQRLINNNWGFRPKRLNFKLFNIQVKEVTQNDGTTTIANNLTSTVQVFTDSEYQLPYVLGSAHQGCLPPFPADVFMVPQYGYLTLNNGSQAVGRSSFYCLEYFPSQMLRTGNNFTFSYTFEDVPFHSSYAHSQSLDRLMNPLIDQYLYYLSRTNTPSGTTTQSRLQFSQAGASDIRDQSRNWLPGPCYRQQRVSKTSADNNNSEYSWTGATKYHLNGRDSLVNPGPAMASHKDDEEKFFPQSGVLIFGKQGSEKTNVDIEKVMITDEEEIRTTNPVATEQYGSVSTNLQRGNRQAATADANTQGVLPGMVWQDRDVYLQGPIWAKIPHTDGHFHPSPLMGGFGLKHPPPQILIKNTPVPANPSTTFSAAKFASFITQYSTGQVSVEIEWELQKENSKRWNPEIQYTSNYNKSVNVDFTVDTNGVYSEPRPIGTRYLTRNL

SEQ ID NO: 12694 - protein, 735 aa, Artificial Sequence
  source: /note="Description of Artificial Sequence: Synthetic polypeptide"
MAADGYLPDWLEDTLSEGIRQWWKLKPGPPPPKPAERHRDDSRGLVLPGYKYLGPFNGLDKGEPVNEADAAALEHDKAYDRQLDSGDNPYLKYNHADAEFQERLKEDTSFGGNLGRAVFQAKKRVLEPLGLVEEPVKTAPGKKRPVEHSPVEPDSSSGTGKAGQQPARKRLNFGQTGDADSVPDPQPLGQPPAAPSGLGTNTMATGSGAPMADNNEGADGVGNSSGNWHCDSTWMGDRVITTSTRTWALPTYNNHLYKQISSQSGASNGNHYFGYSTPWGYFDFNRFHCHFSPRDWQRLINNNWGFRPKRLNFKLFNIQVKEVTQNDGTTTIANNLTSTVQVFTDSEYQLPYVLGSAHQGCLPPFPADVFMVPQYGYLTLNNGSQAVGRSSFYCLEYFPSQMLRTGNNFTFSYTFEDVPFHSSYAHSQSLDRLMNPLIDQYLYYLSRTNTPSGTTTQSRLQFSQAGASDIRDQSRNWLPGPCYRQQRVSKTSADNNNSEYSWTGATKYHLNGRDSLVNPGPAMASHKDDEEKFFPQSGVLIFGKQGSEKTNVDIEKVMITDEGEIRTTNPVATEQYGSVSTNLQRGNRQAATADVNTQGVLPGMVWQDRDVYLQGPIWAKIPHTDGHFHPSPLMGGFGLKHPPPQILIKNTPVPANPSTTFSAAKFASFITQYSTGQVSVEIEWELQKENSKRWNPEIQYTSNYNKSVNVDFTVDTNGVYSEPRPIGTRYLTRNL

SEQ ID NO: 12695 - protein, 735 aa, Artificial Sequence
  source: /note="Description of Artificial Sequence: Synthetic polypeptide"
MAADGYLPDWLEDTLSEGIRQWWKLKPGPPPPKPAERHRDDSRGLVLPGYKYLGPFNGLDKGEPVNEADAAALEHDKAYDRQLDSGDNPYLKYNHADAEFQERLKEDTSFGGNLGRAVFQAKKRVLEPLGLVEEPVKTAPGKKRPVEHSPVEPDSSSGTGKAGQQPARKRLNFGQTGDADSVPDPQPLGQPPAAPSGLGTNTMATGSGAPMADNNEGADGVGNSSGNWHCDSTWMGDRVITTSTRTWALPTYNNHLYKQISSQSGASNGNHYFGYSTPWGYFDFNRFHCHFSPRDWQRLINNNWGFRPKRLNFKLFNIQVKEVTQNDGTTTIANNLTSTVQVFTDSEYQLPYVLGSAHQGCLPPFPADVFMVPQYGYLTLNNGSQAVGRSSFYCLEYFPSQMLRTGNNFTFSYTFEDVPFHSSYAHSQSLDRLMNPLIDQYLYYLSRTNTPSGTTTQSRLQFSQAGASDIRDQSRNWLPGPCYRQQRVSKTSADNNNSEYSWTGATKYHLNGRDSLVNPGPAMASHKDDEEKFFPQSGVLIFGKQGSEKTNVDIEKVMITDEEEIRTTNPVATEQYGSVSTNLQRGNRQAATADVNTQGVLPGMVWQDRDVYLQGPIWAKIPHTDGHFHPSPPMGGFGLKHPPPQILIKNTPVPANPSTTFSAAKFASFITQYSTGQVSVEIEWELQKENSKRWNPEIQYTSNYNKSVNVDFTVDTNGVYSEPRPIGTRYLTRNL

SEQ ID NO: 12696 - protein, 735 aa, Artificial Sequence
  source: /note="Description of Artificial Sequence: Synthetic polypeptide"
MAADGYLPDWLEDTLSEGIRQWWKLKPGPPPPKPAERHRDDSRGLVLPGYKYLGPFNGLDKGEPVNEADAAALEHDKAYDRQLDSGDNPYLKYNHADAEFQERLKEDTSFGGNLGRAVFQAKKRVLEPLGLVEEPVKTAPGKKRPVEHSPVEPDSSSGTGKAGQQPARKRLNFGQTGDADSVPDPQPLGQPPAAPSGLGTNTMATGSGAPMADNNEGADGVGNSSGNWHCDSTWMGDRVITTSTRTWALPTYNNHLYKQISSQSGASNGNHYFGYSTPWGYFDFNRFHCHFSPRDWQRLINNNWGFRPKRLNFKLFNIQVKEVTQNDGTTTIANNLTSTVQVFTDSEYQLPYVLGSAHQGCLPPFPADVFMVPQYGYLTLNNGSQAVGRSSFYCLEYFPSQMLRTGNNFTFSYTFEDVPFHSSYAHSQSLDRLMNPLIDQYLYYLSRTNTPSGTTTQSRLQFSQAGASDIRDQSRNWLPGPCYRQQRVSKTSADNNNSEYSWTGATKYHLNGRDSLVNPGPAMASHKDDEEKFFPQSGVLIFGKQGSEKTNVDIEKVMITDEEEIRTTNPVATEQYGSVSTNLQRGNRQAATADVNTQGVLPGMVWQDRDVYLQGPIWAKIPHTDGHFHPSPLMGGFGLKHPPPQILIKNTPVPANPSTTFSAAKFASFITQYSTGQVSVEIEWELQKENSKRWNPEIQYTSDYNKSVNVDFTVDTNGVYSEPRPIGTRYLTRNL

SEQ ID NO: 12697 - protein, 735 aa, Artificial Sequence
  source: /note="Description of Artificial Sequence: Synthetic polypeptide"
MAADGYLPDWLEDTLSEGIRQWWKLKPGPPPPKPAERHRDDSRGLVLPGYKYLGPFNGLDKGEPVNEADAAALEHDKAYDRQLDSGDNPYLKYNHADAEFQERLKEDTSFGGNLGRAVFQAKKRVLEPLGLVEEPVKTAPGKKRPVEHSPVEPDSSSGTGKAGQQPARKRLNFGQTGDADSVPDPQPLGQPPAAPSGLGTNTMATGSGAPMADNNEGADGVGNSSGNWHCDSTWMGDRVITTSTRTWALPTYNNHLYKQISSQSGASNGNHYFGYSTPWGYFDFNRFHCHFSPRDWQRLINNNWGFRPKRLNFKLFNIQVKEVTQNGGTTTIANNLTSTVQVFTDSEYQLPYVLGSAHQGCLPPFPADVFMVPQYGYLTLNNGSQAVGRSSFYCLEYFPSQMLRTGNNFTFSYTFEDVPFHSSYAHSQSLDRLMNPLIDQYLYYLSRTNTPSGTTTQSRLQFSQAGASDIRDQSRNWLPGPCYRQQRVSKTSADNNNSEYSWTGATKYHLNGRDSLVNPGPAMASHKDDEEKFFPQSGVLIFGKQGSEKTNVDIEKVMITDEEEIRTTNPVATEQYGSVSTNLQRGNRQAATADVNTQGVLPGMVWQDRDVYLQGPIWAKIPHTDGHFHPSPLMGGFGLKHPPPQILIKNTPVPANPSTTFSAAKFASFITQYSTGQVSVEIEWELQKENSKRWNPEIQYTSNYNKSVNVDFTVDTNGVYSEPRPIGTRYLTRNL

SEQ ID NO: 12698 - protein, 735 aa, Artificial Sequence
  source: /note="Description of Artificial Sequence: Synthetic polypeptide"
MAADGYLPDWLEDTLSEGIRQWWKLKPGPPPPKPAERHRDDSRGLVLPGYKYLGPFNGLDKGEPVNEADAAALEHDKAYDRQLDSGDNPYLKYNHADAEFQERLKEDTSFGGNLGRAVFQAKKRVLEPLGLVEEPVKTAPGKKRPVEHSPVEPDSSSGTGKAGQQPARKRLNFGQTGDADSVPDPQPLGQPPAAPSGLGTNTMATGSGAPMADNNEGADGVGNSSGNWHCDSTWMGDRVITTSTRTWALPTYNNHLYKQISSQSGASNGNHYFGYSTPWGYFDFNRFHCHFSPRDWQRLINNNWGFRPKRLNFKLFNIQVKEVTQNDGTTTIANNLTSTVQVFTDSEYQLPYVLGSAHQGCLPPFPADVFMVPQYGYLTLNNGSQAVGRSSFYCLEYFPSQMLRTGNNFTFSYTFEDVPFHSSYAHSQSLDRLMNPLIDQYLYYLSRTNTPSGTTTQSRLQFSQAVASDVRDQSRNWLPGPCYRQQRVSKTSADNNNSEYSWTGATKYHLNGRDSLVNPGPAMASHKDDEEKFFPQSGVLIFGKQGSEKTNVDIEKVMITDEEEIRTTNPVATEQYGSVSTNLQRGNRQAATADVNTQGVLPGMVWQDRDVYLQGPIWAKIPHTDGHFHPSPLMGGFGLKHPPPQILIKNTPVPANPSTTFSAAKFASFITQYSTGQVSVEIEWELQKENSKRWNPEIQYTSNYNKSVNVDFTVDTNGVYSEPRPIGTRYLTRNL

SEQ ID NO: 12699 - protein, 735 aa, Artificial Sequence
  source: /note="Description of Artificial Sequence: Synthetic polypeptide"
MAADGYLPDWLEDTLSEGIRQRWKLKPGPPPPKPAERHRDDSRGLVLPGYKYLGPFNGLDKGEPVNEADAAALEHDKAYDRQLDSGDNPYLKYNHADAEFQERLKEDTSFGGNLGRAVFQAKKRVLEPLGLVEEPVKTAPGKKRPVEHSPVEPDSSSGTGKAGQQPARKRLNFGQTGDADSVPDPQPLGQPPAAPSGLGTNTMATGSGAPMADNNEGADGVGNSSGNWHCDSTWMGDRVITTSTRTWALPTYNNHLYKQISSQSGASNGNHYFGYSTPWGYFDFNRFHCHFSPRDWQRLINNNWGFRPKRLNFKLFNIQVKEVTQNDGTTTIANNLTSTVQVFTDSEYQLPYVLGSAHQGCLPPFPADVFMVPQYGYLTLNNGSQAVGRSSFYCLEYFPSQMLRTGNNFTFSYTFEDVPFHSSYAHSQSLDRLMNPLIDQYLYYLSRTNTPSGTTTQSRLQFSQAGASDIRDQSRNWLPGPCYRQQRVSKTSADNNNSEYSWTGATKYHLNGRDSLVNPGPAMASHKDDEEKFFPQSGVLIFGKQGSEKTNVDIEKVMITDEEEIRTTNPVATEQYGSVSTNLQRGNRQAATADVNTQGVLPGMVWQDRDVYLQGPIWAKIPHTDGHFHPSPLMGGFGLKHPPPQILIKNTPVPANPSTTFSAAKFASFITQYSTGQVSVEIEWELQKENSKRWNPEIQYTSNYNKSVNVDFTVDTNGVYSEPRPIGTRYLTRNL

SEQ ID NO: 12700 - protein, 735 aa, Artificial Sequence
  source: /note="Description of Artificial Sequence: Synthetic polypeptide"
MAADGYLPDWLEDTLSEGIRQWWKLKPGPPPPKPAERHKDDSRGLVLPGYKYLGPFNGLDKGEPVNEADAAALEHDKAYDRQLDSGDNPYLKYNHADAEFQERLKEDTSFGGNLGRAVFQAKKRVLEPLGLVEEPVKTAPGKKRPVEHSPVEPDSSSGTGKAGQQPARKRLNFGQTGDADSVPDPQPLGQPPAAPSGLGTNTMATGSGAPMADNNEGADGVGNSSGNWHCDSTWMGDRVITTSTRTWALPTYNNHLYKQISSQSGASNDNHYFGYSTPWGYFDFNRFHCHFSPRDWQRLINNNWGFRPKRLNFKLFNIQVKEVTQNDGTTTIANNLTSTVQVFTDSEYQLPYVLGSAHQGCLPPFPADVFMVPQYGYLTLNNGSQAVGRSSFYCLEYFPSQMLRTGNNFTFSYTFEDVPFHSSYAHSQSLDRLMNPLIDQYLYYLSRTNTPSGTTTQSRLQFSQAGASDIRDQSRNWLPGPCYRQQRVSKTSADNNNSEYSWTGATKYHLNGRDSLVNPGPAMASHKDDEEKFFPQSGVLIFGKQGSEKTNVDIEKVMTTDEEEIRTTNPVATEQYGSVSTNLQRGNRQAATADVNTQGVLPGMVWQDRDVYLQGPIWAKIPHTDGHFHPSPLMGGFGLKHPPPQILIKNTPVPANPSTTFSAAKFASFITQYSTGQVSVEIEWELQKENSKRWNPEIQYTSNYNKSVNVDFTVDTNGVYSEPRPIGTRYLTRNL

SEQ ID NO: 12701 - protein, 735 aa, Artificial Sequence
  source: /note="Description of Artificial Sequence: Synthetic polypeptide"
MAADGYLPDWLEDTLSEGIRQWWKLKPGPPPPKPAERHKDDSRGLVLPGYKYLGPFNGLDKGEPVNEADAAALEHDKAYDRQLDSGDNPYLKYNHADAEFQERLKEDTSFGGNLGRAVFQAKKRVLEPPGLVEEPVKTAPGKKRPVEHSPVEPDSSSGTGKAGQQPARKRLNFGQTGDADSVPDPQPLGQPPAAPSGLGTNTMATGSGAPMADNNEGADGVGNSSGNWHCDSTWMGDRVITTSTRTWALPTYNNHLYKQISSQSGASNDNHYFGYSTPWGYFDFNRFHCHFSPRDWQRLINNNWGFRPKRLNFKLFNIQVKEVTQNDGTTTIANNLTSTVQVFTDSEYQLPYVLGSAHQGCLPPFPADVFMVPQYGYLTLNNGSQAVGRSSFYCLEYFPSQMLRTGNNFTFSYTFEDVPFHSSYAHSQSLDRLMNPLIDQYLYYLSRTNTPSGTTTQSRLQFSQAGASDIRDQSRNWLPGPCYRQQRVSKTSADNNNSEYSWTGATKYHLNGRDSLVNPGPAMASHKDDEEKFFPQSGVLIFGKQGSEKTNVDIEKVMTTDEEEIRTTNPVATEQYGSVSTNLQRGNRQAATADVNTQGVLPGMVWQDRDVYLQGPIWAKIPHTDGHFHPSPLMGGFGLKHPPPQILIKNTPVPANPSTTFSAAKFASFITQYSTGQVSVEIEWELQKENSKRWNPEIQYTSNYNKSVNVDFTVDTNGVYSEPRPIGTRYLTRNL

SEQ ID NO: 12702 - protein, 735 aa, Artificial Sequence
  source: /note="Description of Artificial Sequence: Synthetic polypeptide"
MAADGYLPDWLEDTLSEGIRQWWKLKPGPPPPKPAERHKDDSRGLVLPGYKYLGPFNGLDKGEPVNEADAAALEHDKAYDRQLDSGDNPYLKYNHADAEFQERLKEDTSFGGNLGRAVFQAKKRVLEPLGLVEEPVKTAPGKKRPVEHSPVEPDSSSGTGKAGQQPARKRLNFGQTGDADSVPDPQPLGQPPAAPSGLGTNTMATGSGAPMADNNEGADGVGNSSGNWHCDSTWMGDRVITTSTRTWALPTYNNHLYKQISSQSGASNDNHYFGYSTPWGYFDFNRFHCHFSPRDWQRLINNNWGFRPKRLNFKLFNIQVKEVTQNDGTTTIANNLTSTVQVFTDSEYQLPYVLGSAHQGCLPPFPADVFMVPQYGYLTLNNGSQAVGRSSFYCLEYFPSQMLRTGNNFTFSYTFEDVPFHSSYAHSQSLDRLMNPLIDQYLYYLSRTNTPSGTTTQSRLQFSQAGASDIRDQSRNWLPGPCYRQQRVSKTSADNNNSEYSWTGATKYHLNGRDSLVNPGPAMASHKDDEEKFFPQSGVLIFGKQGSEKTNVDIEKVMTTDEEEIRTTNPVATEQYGSVSTNLQRGNRQAATADVNTQGVLPGMVWQDRDVYLQGPIWAKIPHTDGHFHPSPLMGGFGLKHPPPQILIKNTPVPANPSTTFSAAKFASFITQYSTGQVSVEIEWELQKENGKRWNPEIQYTSNYNKSVNVDFTVDTNGVYSEPRPIGTRYLTRNL

SEQ ID NO: 12703 - protein, 735 aa, Artificial Sequence
  source: /note="Description of Artificial Sequence: Synthetic polypeptide"
MAADGYLPDWLEDTLSEGIRQWWKLKPGPPPPEPAERHKDDSRGLVLPGYKYLGPFNGLDKGEPVNEADAAALEHDKAYDRQLDSGDNPYLKYNHADAEFQERLKEDTSFGGNLGRAVFQAKKRVLEPLGLVEEPVKTAPGKKRPVEHSPVEPDSSSGTGKAGQQPARKRLNFGQTGDADSVPDPQPLGQPPAAPTSLGSTTMATGSGAPMADNNEGADGVGNSSGNWHCDSQWLGDRVITTSTRTWALPTYNNHLYKQISSQSGASNDNHYFGHSTPWGYFDFNRFHCHFSPRDWQRLINNNWGFRPKRLNFKLFNIQVKEVTQNDGTTTIANNLTSTVQVFTDSEYQLPYVLGSAHQGCLPPFPADVFMVPQYGYLTLNNGSQAVGRSSFYCLEYFPSQMLRTGNNFTFSYTFEDVPFHSSYAHSQSLDRLMNPLIDQYLYYLNKTQSNSGTLQQSRLLFSQAGPTSMSLQAKNWLPGPCYRQQRLSKQANDNNNSNFPWTAATKYHLNGRDSLVNPGPAMASHKDDEEKFFPMHGTLIFGKQGTNANDADLDNVMITDEEEIRTTNPVATEQYGTVSNNLQNSNTGPTTGTVNHQGALPGMVWQDRDVYLQGPIWAKIPHTDGHFHPSPLMGGFGLKHPPPQIMIKNTPVPANPPTNFSSAKFASFITQYSTGQVSVEIEWELQKENSKRWNPEIQYTSNYNKSVNVDFTVDTNGVYSEPRPIGTRYLTRNL

SEQ ID NO: 12704 - protein, 735 aa, Artificial Sequence
  source: /note="Description of Artificial Sequence: Synthetic polypeptide"
MAADGYLPDWLEDTLSEGIRQWWKLKPGPPPPKPAERHKDDSRGLVLPGYKYLGPFNGLDKGEPVNEADAAALEHDKAYDRQLDSGDNPYLKYNHADAEFQERLKEDTSFGGNLGRAVFQAKKRVLEPLGLVEEPVKTAPGKKRPVEHSPVEPDSSSGTGKAGQQPARKRLNFGQTGDADSVPDPQPLGQPPAAPTSLGSTTMATGSGAPMADNNEGADGVGNSSGNWHCDSQWLGDRVITTSTRTWALPTYNNHLYKQISSQSGASNDNHYFGHSTPWGYFDFNRFHCHFSPRDWQRLINNNWGFRPKRLNFKLFNIQVKEVTQNDGTTTIANNLTSTVQVFTDSEYQLPYVLGSAHQGCLPPFPADVFMVSQYGYLTLNNGSQAVGRSSFYCLEYFPSQMLRTGNNFTFSYTFEDVPFHSSYAHSQSLDRLMNPLIDQYLYYLNKTQSNSGTLQQSRLLFSQAGPTSMSLQAKNWLPGPCYRQQRLSKQANDNNNSNFPWTAATKYHLNGRDSLVNPGPAMASHKDDEEKFFPMHGTLIFGKQGTNANDADLDNVMITDEEEIRTTNPVATEQYGTVSNNLQNSNTGPTTGTVNHQGALPGMVWQDRDVYLQGPIWAKIPHTDGHFHPSPLMGGFGLKHPPPQIMIKNTPVPANPPTNFSSAKFASFITQYSTGQVSVEIEWELQKENSKRWNPEIQYTSNYNKSVNVDFTVDTNGVYSEPRPIGTRYLTRNL

SEQ ID NO: 12705 - protein, 735 aa, Artificial Sequence
  source: /note="Description of Artificial Sequence: Synthetic polypeptide"
MAADGYLPDWLEDTLSEGIRQWWKLKPGPPPPKPAERHKDDSRGLVLPGYKYLGPFNGLDKGEPVNEADAAALEHDKAYDRQLDSGDNPYLKYNHADAEFQERLKEDTSFGGNLGRAVFQAKKRVLEPLGLVEEPVKTAPGKKRPVEHSPVEPDSSSGTGKAGQQPARKRLNFGQTGDADSVPDPQPLGQPPAAPTSLGSTTMATGSGAPMADNNEGADGVGNSSGNWHCDSQWLGDRVITTSTRTWALPTYNNHLYKQISSQSGASNDNHYFGHSTPWGYFDFNRFHCHFSPRDWQRLINNNWGFRPKRLNFKLFNIQVKEVTQNDGTTTIANNLTSTVQVFTDSEYQLPYVLGSAHQGCLPPFPADVFMVSQYGYLTLNNGSQAVGRSSFYCLEYFPSQMLRTGNNFTFSYTFEDVPFHSSYAHSQSLDRLMNPLIDQYLYYLNKTQSNSGTLQQSRLLFSQAGPTSMSLQAKNWLPGPCYRQQRLSKQANDNNNSNFPWTAATKYHLNGRDSLVNPGPAMASHKDDEEKLFPMHGTLIFGKQGTNANDADLDNVMITDEEEIRTTNPVATEQYGTVSNNLQNSNTGPTTGTVNHQGALPGMVWQDRDVYLQGPIWAKIPHTDGHFHPSPLMGGFGLKHPPPQIMIKNTPVPANPPTNFSSAKFASFITQYSTGQVSVEIEWELQKENSKRWNPEIQYTSNYNKSVNVDFTVDTNGVYSEPRPIGTRYLTRNL

SEQ ID NO: 12706 - protein, 735 aa, Artificial Sequence
  source: /note="Description of Artificial Sequence: Synthetic polypeptide"
MAADGYLPDWLEDTLSEGIRQWWKLKPGPPPPKPAERHKDDSRGLVLPGYKYLGPFNGLDKGEPVNEADAAALEHDKAYDRQLDSGDNPYLKYNHADAEFQERLKEDTSFGGNLGRAVFQAKKRVLEPLGLVEEPVKTAPGKKRPVEHSPVEPDSSSGTGKAGQQPARKRLNFGQTGDADSVPDPQPLGQPPAAPTSLGSTTMATGSGAPMADNNEGADGVGNSSGNWHCDSQWLGDRVITTSTRTWALPTYNNHLYKQISSQSGASNDNHYFGHSTPWGYFDFNRFHCHFSPRDWQRLINNNWGFRPKRLNFKLFNIQVKEVTQNDGTTTIANNLTSTVQVFTDSEYQLPYVLGSAHQGCLPPFPADVFMVPQYGYLTLNNGSQAVGRSSFYCLEYFPSQMLRTGNNFTFSYTFEDVPFHSSYAHSQSLDRLMNPLIDQYLYYLNKTQSNSGTLQQSRLLFSQAGPTSMSLQAKNWLPGPCYRQQRLSKQANDNNNSNFSWTAATKYHLNGRDSLVNPGPAMASHKDDEEKFFPMHGTLIFGKQGTNANDADLDNVMITDEEEIRTTNPVATEQYGTVSNNLQNSNTGPTTGTVNHQGALPGMVWQDRDVYLQGPIWAKIPHTDGHFHPSPLMGGFGLKHPPPQIMIKNTPVPANPPTNFSSAKFASFITQYSTGQVSVEIEWELQKENSKRWNPEIQYTSNYNKSVNVDFTVDTNGVYSEPRPIGTRYLTRNL

SEQ ID NO: 12707 - protein, 735 aa, Artificial Sequence
  source: /note="Description of Artificial Sequence: Synthetic polypeptide"
MAADGYLPDWLEDTLSEGIRQWWKLKPGPPPPKPAERHKDDSRGLVLPGYKYLGPFNGLDKGEPVNEADAAALEHDKAYDRQLDSGDNPYLKYNHADAEFQERLKEDTSFGGNLGRAVFQAKKRVLEPLGLVEEPVKTAPGKKRPVEHSPVEPDSSSGTGKAGQQPARKRLNFGQTGDADSVPDPQPLGQPPAAPTSLGSTTMATGSGAPMADNNEGADGVGNSSGNWHCDSQWLGDRVITTSTRTWALPTYNNHLYKQISSQSGASNDNHYFGHSTPWGYFDFNRFHCHFSPRDWQRLINNNWGFRPKRLNFKLFNIQVKEVTQNDGTTTIANNLTSTVQVFTDSEYQLPYVLGSAHQGCLPPFPADVFMVPQYGYLTLNNGSQAVGRSSFYCLEYFPSQMLRTGNNFTFSYTFEDVPFHSSYAHSQSLDRLMNPLIDQYLYYLNKTQSNSGTLQQSRLLFSQAGPTSMSLQAKNWLPGPCYRQQRLSKQANDNNNSNFPWTAATKYHLNGRDSLVNPGPAMASHKDDEEKFFPMHGTLIFGKQGTNANDADLDNVMITDEEEIRTTNPLATEQYGTVSNNLQNSNTGPTTGTVNHQGALPGMVWQDRDVYLQGPIWAKIPHTDGHFHPSPLMGGFGLKHPPPQIMIKNTPVPANPPTNFSSAKFASFITQYSTGQVSVEIEWELQKENSKRWNPEIQYTSNYNKSVNVDFTVDTNGVYSEPRPIGTRYLTRNL

SEQ ID NO: 12708 - protein, 735 aa, Artificial Sequence
  source: /note="Description of Artificial Sequence: Synthetic polypeptide"
MAADGYLPDWLEDTLSEGIRQWWKLKPGPPPPKPAERHKDDSRGLVLPGYKYLGPFNGLDKGEPVNEADAAALEHDKAYDRQLDSGDNPYLKYNHADAEFQERLKEDTSFGGNLGRAVFQAKKRVLEPLGLVEEPVKTAPRKKRPVEHSPVEPDSSSGTGKAGQQPARKRLNFGQTGDADSVPDPQPLGQPPAAPTSLGSTTMATGSGAPMADNNEGADGVGNSSGNWHCDSQWLGDRVITTSTRTWALPTYNNHLYKQISSQSGASNDNHYFGHSTPWGYFDFNRFHCHFSPRDWQRLINNNWGFRPKRLNFKLFNIQVKEVTQNDGTTTIANNLTSTVQVFTDSEYQLPYVLGSAHQGCLPPFPADVFMVPQYGYLTLNNGSQAVGRSSFYCLEYFPSQMLRTGNNFTFSYTFEDVPFHSSYAHSQSLDRLMNPLIDQYLYYLNKTQSNSGTLQQSRLLFSQAGPTSMSLQAKNWLPGPCYRQQRLSKQANDNNNSNFPWTAATKYHLNGRDSLVNPGPAMASHKDDEEKFFPMHGTLIFGKQGTNANDADLDNVMITDEEEIRTTNPVATEQYGTVSNNLQNSNTGPTTGTVNHQGALPGMVWQDRDVYLQGPIWAKIPHTDGHFHPSPLMGGFGLKHPPPQIMIKNTPVPANPPTNFSSAKFASFITQYSTGQVSVEIEWELQKENSKRWNPEIQYTSNYNKSVNVDFTVDTNGVYSEPRPIGTRYLTRNL

SEQ ID NO: 12709 - protein, 735 aa, Artificial Sequence
  source: /note="Description of Artificial Sequence: Synthetic polypeptide"
MAADGYLPDWLEDTLSEGIRQWWKLKPGPPPPKPAERHKDDSRGLVLPGYKYLGPFNGLDKGEPVNEADAAALEHDKAYDRQLDSGDNPYLKYNHADAEFQERLKEDTSFGGNLGRAVFQAKKRVLEPLGLVEEPVKTAPGKKRPVEHSPVEPDSSSGTGKAGQQPARKRLNFGQTGDADSVPDPQPLGQPPAAPTSLGSTTMATGSGAPMADNNEGADGVGNSSGNWHCDSQWLGDRVITTSTRTWALPTYNNHLYKQISSQSGASNDNHYFGHSTPWGYFDFNRFHCHFSPRDWQRLINNNWGFRPKRLNFKLFNIQVKEVTQNDGTTTIANNLTSTVQVFTDSEYQLPYVLGSAHQGCLPPFPADVFMVPQYGYLTLNNGSQAVGRSSFYCLEYFPSQMLRTGNNFTFSYTFEDVPFHSSYAHSQSLDRLMNPLIDQYLYYLNKTQSNSGTLQQSRLLFSQAGPTSMSLQAKNWLPGPCYRQQRLSKQANDNNNSNFPWTAATKYHLNGRDSLVNPGPAMASHKDDEEKFFPMHGTLIFGKQGTNANDADLDNVMITDEEEIRTTNPVATEQYGTVSNNLQNSNTGPTTGTVNHQGALPGMVWQDRDVYLQGPIWAKIPHTDGRFHPSPLMGGFGLKHPPPQIMIKNTPVPANPPTNFSSAKFASFITQYSTGQVSVEIEWELQKENSKRWNPEIQYTSNYNKSVNVDFTVDTNGVYSEPRPIGTRYLTRNL

SEQ ID NO: 12710 - protein, 735 aa, Artificial Sequence
  source: /note="Description of Artificial Sequence: Synthetic polypeptide"
MAADGYLPDWLEDTLSEGIRQWWKLKPGPPPPKPAERHKDDSRGLVLPGYKYLGPFNGLDKGEPVNEADAAALEHDKAYDRQLDSGDNPYLKYNHADAEFQERLKEDTSFGGNLGRAVFQAKKRVLEPLGLVEEPVKTAPGKKRPVEHSPVEPDSSSGTGKAGQQPARKRLNFGQTGDADSVPDPQPLGQPPAAPTSLGSTTMATGSGAPMADNNEGADGVGNSSGNWHCDSQWLGDRVITTSTRTWALPTYSNHLYKQISSQSGASNDNHYFGHSTPWGYFDFNRFHCHFSPRDWQRLINNNWGFRPKRLNFKLFNIQVKEVTQNDGTTTIANNLTSTVQVFTDSEYQLPYVLGSAHQGCLPPLPADVFMVPQYGYLTLNNGSQAVGRSSFYCLEYFPSQMLRTGNNFTFSYTFEDVPFHSSYAHSQSLDRLMNPLIDQYLYYLNKTQSNSGTLQQSRLLFSQAGPTSMSLQAKNWLPGPCYRQQRLSKQANDNNNSNFPWTAATKYHLNGRDSLVNPGPAMASHKDDEEKFFPMHGTLIFGKQGTNANDADLDNVMITDEEEIRTTNPVATEQYGTVSNNLQNSNTGPTTGTVNHQGALPGMVWQDRDVYLQGPIWAKIPHTDGHFHPSPLMGGFGLKHPPPQIMIKNTPVPANPPTNFSSAKFASFITQYSTGQVSVEIEWELQKENSKRWNPEIQYTSNYNKSVNVDFTVDTNGVYSEPRPIGTRYLTRNL

SEQ ID NO: 12711 - protein, 735 aa, Artificial Sequence
  source: /note="Description of Artificial Sequence: Synthetic polypeptide"
MAADGYLPDWLEDTLSEGIRQWWKLKPGPPPPKPAERHKDDSRGLVLPGYKYLGPFNGLDKGEPVNEADAAALEHDKAYDRQLDSGDNPYLKYNHADAEFQERLKEDTSFGGNLGRAVFQAKKRVLEPLGLVEEPVKTAPGKKRPVEHSPVEPDSSSGTGKAGQQPARKRLNFGQTGGADSVPDPQPLGQPPAAPTSLGSTTMATGSGAPMADNNEGADGVGNSSGNWHCDSQWLGDRVITTSTRTWALPTYNNHLYKQISSQSGASNDNHYFGHSTPWGYFDFNRFHCHFSPRDWQRLINNNWGFRPKRLNFKLFNIQVKEVTQNDGTTTIANNLTSTVQVFTDSEYQLPYVLGSAHQGCLPPFPADVFMVPQYGYLTLNNGSQAVGRSSFYCLEYFPSQMLRTGNNFTFSYTFEDVPFHSSYAHSQSLDRLMNPLIDQYLYYLNKTQSNSGTLQQSRLLFSQAGPTSMSLQAKNWLPGPCYRQQRLSKQANDNNNSNFPWTAATKYHLNGRDSLVNPGPAMASHKDDEEKFFPMHGTLIFGKQGTNANDADLDNVMITDEEEIRTTNPVATEQYGTVSNNLQNSNTGPTTGTVNHQGALPGMVWQDRDVYLQGPIWAKIPHTDGHFHPSPLMGGFGLKHPPPQIMIKNTPVPANPPTNFSSAKFASFITQYSTGQVSVEIEWELQKENSKRWNPEIQYTSNYNKSVNVDFTVDTNGVYSEPRPIGTRYLTRNL

SEQ ID NO: 12712 - protein, 735 aa, Artificial Sequence
  source: /note="Description of Artificial Sequence: Synthetic polypeptide"
MAADGYLPDWLEDTLSEGIRQWWKLKPGPPPPKPAERHKDDSRGLVLPGYKYLGPFNGLDKGEPVNEADAAALEHGKAYDRQLDSGDNPYLKYNHADAEFQERLKEDTSFGGNLGRAVFQAKKRVLEPLGLVEEPVKTAPGKKRPVEHSPVEPDSSSGTGKAGQQPARKRLNFGQTGDADSVPDPQPLGQPPAAPTSLGSTTMATGSGAPMADNNEGADGVGNSSGNWHCDSQWLGDRVITTSTRTWALPTYNNHLYKQISSQSGASNDNHYFGHSTPWGYFDFNRFHCHFSPRDWQRLINNNWGFRPKRLNFKLFNIQVKEVTQNDGTTTIANNLTSTVQVFTDSEYQLPYVLGSAHQGCLPPFPADVFMVPQYGYLTLNNGSQAVGRSSFYCLEYFPSQMLRTGNNFTFSYTFEDVPFHSSYAHSQSLDRLMNPLIDQYLYYLNKTQSNSGTLQQSRLLFSQAGPTSMSLQAKNWLPGPCYRQQRLSKQANDNNNSNFPWTAATKYHLNGRDSLVNPGPAMASHKDDEEKFFPMHGTLIFGKQGTNANDADLDNVMITDEEEIRTTNPVATEQYGTVSNNLQNSNTGPTTGTVNHQGALPGMVWQDRDVYLQGPIWAKIPHTDGHFHPSPLMGGFGLKHPPPQIMIKNTPVPANPPTNFSSAKFASFITQYSTGQVSVEIEWELQKENSKRWNPEIQYTSNYNKSVNVDFTVDTNGVYSEPRPIGTRYLTRNL

SEQ ID NO: 12713 - protein, 735 aa, Artificial Sequence
  source: /note="Description of Artificial Sequence: Synthetic polypeptide"
MAADGYLPDWLEDTLSEGIRQWWKLKPGPPPPKPAERHKDDSRGLVLPGYKYLGPFNGLDKGEPVNEADAAALEHDKAYDRQLDSGDNPYLKYNHADAEFQERLKEDTSFGGNLGRAVFQAKKRVLEPLGLVEEPVKTAPGKKRPVEHSPVEPDSSSGTGKAGQQPARKRLNFGQTGDADSVPDPQPLGQPPAAPTSLGSTTMATGSGAPMADNNEGADGVGNSSGNWHCDSQWLGDRVITTSTRTWALPTYNNHLYKQISSQSGASNDNHYFGHSTPWGYFDFNRFHCHFSPRDRQRLINNNWGFRPKRLNFKLFNIQVKEVTQNDGTTTIANNLTSTVQVFTDSEYQLPYVLGSAHQGCLPPFPADVFMVPQYGYLTLNNGSQAVGRSSFYCLEYFPSQMLRTGNNFTFSYTFEDVPFHSSYAHSQSLDRLMNPLIDQYLYYLNKTQSNSGTLQQSRLLFSQAGPTSMSLQAKNWLPGPCYRQQRLSKQANDNNNSNFPWTAATKYHLNGRDSLVNPGPAMASHKDDEEKFFPMHGTLIFGKQGTNANDADLDNVMITDEEEIRTTNPVATEQYGTVSNNLQNSNTGPTTGTVNHQGALPGMVWQDRDVYLQGPIWAKIPHTDGHFHPSPLMGGFGLKHPPPQIMIKNTPVPANPPTNFSSAKFASFITQYSTGQVSVEIEWELQKENSKRWNPEIQYTSNYNKSVNVDFTVDTNGVYSEPRPIGTRYLTRNL

SEQ ID NO: 12714 - protein, 735 aa, Artificial Sequence
  source: /note="Description of Artificial Sequence: Synthetic polypeptide"
MAADGYLPDWLEDTLSEGIRQWWKLKPGPPPPKPAERHKDDSRGLVLPGYKYLGPFNGLDKGEPVNEADAAALEHDKAYDRQLDSGDNPYLKYNHADAEFQERLKEDTSFGGNLGRAVFQAKKRVLEPLGLVEEPVKTAPGKKRPVEHSPVEPDSSSGTGKAGQQPARKRLNFGQTGDADSVPDPQPLGQPPAAPTSLGSTTMATGSGAPMADNNEGADGVGNSSGNWHCDSQWLGDRVITTSTRTWALPTYNNHLYKQISSQSGASNDNHYFGHSTPWGYFDFNRFHCHFSPRDWQRLINNNWGFRPKRPNFKLFNIQVKEVTQNDGTTTIANNLTSTVQVFTDSEYQLPYVLGSAHQGCLPPFPADVFMVPQYGYLTLNNGSQAVGRSSFYCLEYFPSQMLRTGNNFTFSYTFEDVPFHSSYAHSQSLDRLMNPLIDQYLYYLNKTQSNSGTLQQSRLLFSQAGPTSMSLQAKNWLPGPCYRQQRLSKQANDNNNSNFPWTAATKYHLNGRDSLVNPGPAMASHKDDEEKFFPMHGTLIFGKQGTNANDADLDNVMITDEEEIRTTNPVATEQYGTVSNNLQNSNTGPTTGTVNHQGALPGMVWQDRDVYLQGPIWAKIPHTDGHFHPSPLMGGFGLKHPPPQIMIKNTPVPANPPTNFSSAKFASFITQYSTGQVSVEIEWELQKENSKRWNPEIQYTSNYNKSVNVDFTVDTNGVYSEPRPIGTRYLTRNL

SEQ ID NO: 12715 - protein, 735 aa, Artificial Sequence
  source: /note="Description of Artificial Sequence: Synthetic polypeptide"
MAADGYLPDWLEDTLSEGIRQWWKLKPGPPPPKPAERHKDDSRGLVLPGYKYLGPFNGLDKGEPVNEADAAALEHDKAYDRQLDSGDNPYLKYNHADAEFQERLKEDTSFGGNLGRAVFQAKKRVLEPLGLVEEPVKTAPGKKRPVEHSPVEPDSSSGTGKAGQQPARKRLNFGQTGDADSVPDPQPLGQPPAAPTSLGSTTMATGSGAPMADNNEGADGVGNSSGNWHCDSQWLGDRVITTSTRTWALPTYNNHLYKQISSQSGASNDNHYFGHSTPWGYFDFNRFHCHFSPRDWQRLINNNWGFRPKRLNFKLFNIQVKEVTQNDGTTTIANNLTSTVQVFTDSEYQLPYVLGSAHQGCLPPFPADVFMVPQYGYLTLNNGSQAVGRSSFYCLEYFPSQMLRTGNNFTFSYTFEDVPFHSSYAHSQSLDRLMNPLIDQYLYYLNKTQSNSGTLQQSRLLFSQAGPTSMSLQAKNWLPGPCYRQQRLSKQANDNNNSNFPWTAATKYHLNGRDSLVNPGPAMASHKDDEEKFFPMHGTLIFGKQGTNANDADLDNVMITDEEEIRTTNPVATEQYGTVSNNLQNSNTGPTTGTVNHQGALPGMVWQDRDVYLQGPIWAKIPHTDGHFHPSPLMGGFGLKHPPPQIMIKNTPVPANPPTNFSSAKFASFITQYSTGQVSVEIEWELQKENSKRWNPEIQYTSNYNKSVNVDFTVGTNGVYSEPRPIGTRYLTRNL

SEQ ID NO: 12716 - protein, 735 aa, Artificial Sequence
  source: /note="Description of Artificial Sequence: Synthetic polypeptide"
MAADGYLPDWLEDTLSEGIRQWWKLKPGPPPPKPAERHKDDSRGLVLPGYKYLGPFNGLDKGEPVNEADAAALEHDKAYDRQLDSGDNPYLKYNHADAEFQERLKEDTSFGGNLGRAVFQAKKRVLEPLGLVEEPVKTAPGKKRPVEHSPVEPDSSSGTGKAGQQPARKRLNFGQTGDADSVPDPQPLGQPPAAPTSLGSTTMATGSGAPMADNNEGADGVGNSSGNWHCDSQWLGDRVITTSTRTWALPTYNNHLYKQISSQSGASNDNHYFGHSTPWGYFDFNRFHCHFSPRDWQRLINNNWGFRPKRLNFKLFNIQVKEVTQNDGTTTIANNLTSTVQVFTDSEYQLPYVLGSAHQGCLPPFPADVFMVPQYGYLTLNNGSQAVGRSSFYCLEYFPSQMLRTGNNFTFSYTFEDVPFHSSYAHSQSLDRLMNPLIDQYLYYLNKTQSNSGTLQQSRLLFSQAGPTSTSLQAKNWLPGPCYRQQRLSKQANDNNNSNFPWTAATKYHLNGRDSLVNPGPAMASHKDDEEKFFPMHGTLIFGKQGTNANDADLDNVMITDEEEIRTTNPVATEQYGTVSNNLQNSNTGPTTGTVNHQGALPGMVWQDRDVYLQGPIWAKIPHTDGHFHPSPLMGGFGLKHPPPQIMIKNTPVPANPPTNFSSAKFASFITQYSTGQVSVEIEWELQKENSKRWNPEIQYTSNYNKSVNVDFTVDTNGVYSEPRPIGTRYLTRNL

SEQ ID NO: 12717 - protein, 735 aa, Artificial Sequence
  source: /note="Description of Artificial Sequence: Synthetic polypeptide"
MAADGYLPDWLEDTLSEGIRQWWKLKPGPPPPKPAERHKDDSRGLVLPGYKYLGPFNGLDKGEPVNEADAAALEHDKAYDRQLDSGDNPYLKYNHADAEFQERLKEDTSFGGNLGRAVFQAKKRVLEPLGLVEEPVKTAPGKKRPVEHSPVEPDSSSGTGKAGQQPARKRLNFGQTGDADSVPDPQPLGQPPAAPTSLGSTTMATGSGAPMADNNEGADGVGNSSGNWHCDSQWLGDRVITTSTRTWALPTYNNHLYKQISSQSGASNDNHYFGHSTPWGYFDFNRFHCHFSPRDWQRLINNNWGFRPKRLNFKLFNIQVKEVTQNDGTTTIANNLTSTVQVFTDSEYQLPYVLGSAHQGCLPPFPADVFMVPQYGYLTLNNGSQAVGRSSFYCLEYFPSQMLRTGNNFTFSYTFEDVPFHSSYAHSQSLDRLMNPLIDQYLYYLNKTQSNSGTLQQSRLLFSQAGPTSMSLQAKNWLPGPCYRQQRLSKQANDNNNSNFPWTAATKYHLNGRDSLVNPGPAMASHKDDEEKFFPMHGTLIFGKQGTNANDADLDNVMITDEEEIRTTNPVATEQYGTVSNNLQNSNTGPTTGTINHQGALPGMVWQDRDVYLQGPIWAKIPHTDGHFHPSPLMGGFGLKHPPPQIMIKNTPVPANPPTNFSSAKFASFITQYSTGQVSVEIEWELQKENSKRWNPEIQYTSNYNKSVNVDFTVDTNGVYSEPRPIGTRYLTRNL

SEQ ID NO: 12718 - protein, 735 aa, Artificial Sequence
  source: /note="Description of Artificial Sequence: Synthetic polypeptide"
MAADGYLPDWLEDTLSEGIRQWWKLKPGPPPPKPAERHKDDSRGLVLPGYKYLGPFNGLDKGEPVNEADAAALEHDKAYDRQLDSGDNPYLKYNHADAEFQERLKEDTSFGGNLGRAVFQAKKRVLEPLGLVEEPVKTAPGKKRPVEHSPVEPDSSSGTGKAGQQPARKRLNFGQTGDADSVPDPQPLGQPPAAPTSLGSTTMATGSGAPMADNNEGADGVGNSSGNWHCDSQWLGDRVITTSTRTWALPTYNNHLYKQISSQSGASNDNHYFGHSTPWGYFDFNRFHCHFSPRDWQRLINNNWGFRPKRLNFKLFNIQVKEVTQNDGTATIANNLTSTVQVFTDSEYQLPYVLGSAHQGCLPPFPADVFMVPQYGYLTLNNGSQAVGRSSFYCLEYFPSQMLRTGNNFTFSYTFEDVPFHSSYAHSQSLDRLMNPLIDQYLYYLNKTQSNSGTLQQSRLLFSQAGPTSMSLQAKNWLPGPCYRQQRLSKQANDNNNSNFPWTAATKYHLNGRDSLVNPGPAMASHKDDEEKFFPMHGTLIFGKQGTNANDADLDNVMITDEEEIRTTNPVATEQYGTVSNNLQNSNTGPTTGTVNHQGALPGMVWQDRDVYLQGPIWAKIPHTDGHFHPSPLMGGFGLKHPPPQIMIKNTPVPANPPTNFSSAKFASFITQYSTGQVSVEIEWELQKENSKRWNPEIQYTSNYNKSVNVDFTVDTNGVYSEPRPIGTRYLTRNL

SEQ ID NO: 12719 - protein, 735 aa, Artificial Sequence
  source: /note="Description of Artificial Sequence: Synthetic polypeptide"
MAADGYLPDWLEDTLSEGIRQWWKLKPGPPPPKPAERHKDDSRGLVLPGYKYLGPFNGLDKGEPVNEADAAALEHDKAYDRQLDSGDNPYLKYNHADAEFQERLKEDTSFGGNLGRAVFQAKKRVLEPLGLVEEPVKTAPGKKRPVEHSPVEPDSSSGTGKAGQQPARKRLNFGQTGDADSVPDPQPLGQPPAAPTSLGSTTMATGSGAPMADNNEGADGVGNSSGNWHCDSQWLGDRVITTSTRTWALPTYNNHLYKQISSQSGASNDNHYFGHSTPWGYFDFNRFHCHFSPRDWQRLINNNWGFRPKRLNFKLFNIQVKEVTQNDGTTTIANNLTSTVQVFTDSEYQLPYVLGSAHQGCLPPFPADVFMVPQYGYLTLNNGSQAVGRSSFYCLEYFPSQMLRTGNNFTFSYTFEDVPFHSSYAHSQSLDRLMNPLIDQYLYYLNKTQSNSGTLQQSRLLFSQAGPTSMSLQAKNWLPGPCYRQQRLSKQANDNNNSNFPWTVATKYHLNGRDSLVNPGPAMASHKDDEEKFFPMHGTLIFGKQGTNANDADLDNVMITDEEEIRTTNPVATEQYGTVSNNLQNSNTGPTTGTVNHQGALPGMVWQDRDVYLQGPIWAKIPHTDGHFHPSPLMGGFGLKHPPPQIMIKNTPVPANPPTNFSSAKFASFITQYSTGQVSVEIEWELQKENSKRWNPEIQYTSNYNKSVNVDFTVDTNGVYSEPRPIGTRYLTRNL

SEQ ID NO: 12720 - protein, 735 aa, Artificial Sequence
  source: /note="Description of Artificial Sequence: Synthetic polypeptide"
MAADGYLPDWLEDTLSEGIRQWWKLKPGPPPPKPAERHKDDSRGLVLPGYKYLGPFNGLDKGEPVNEADAAALEHDKAYDRQLDSGDNPYLKYNHADAEFQERLKEDTSFGGNLGRAVFQAKKRVLEPLGLVEEPVKTAPGKKRPVEHSPVEPDSSSGTGKAGQQPARKRLNFGQTGDADSVPDPQPLGQPPAAPTSLGSTTMATGSGAPMADNNEGADGVGNSSGNWHCDSQWLGDRVITTSTRTWALPTYNNHLYKQISSQSGASNDNHYFGHSTPWGYFDFNRFHCHFSPRDWQRLINNNWGFRPKRLNFKLFNIQVKEVTQNDGTTTIANNLTSTVQVFTDSEYQLPYVLGSAHQGCLPPFPADVFMVPQYGYLTLNNGSQAVGRSSFYCLEYFPSQMLRTGNNFTFSYTFEDVPFHSSYAHSQSLDRLMNPLIDQYLYYLNKTQSNSGTLQQSRLLFSQAGPTSMSLQAKNWLPGPCYRQQRLSKQANDNNNSNFPWTAATKYHLNGRDSLVNPGPAMASHKDDEEKFFPMHGTLIFGKQGTNANDADLDNVMITDEEEIRTTNPVATEQYGTVSNNLQNSNTGPTTGTVNHQGALPGMVWQDRDVYLQGPIWAKIPHTDGHFHPSPLMGGFGLKHPPPQIMIKNTPVPANPPTNFSSAKFASFITQHSTGQVSVEIEWELQKENSKRWNPEIQYTSNYNKSVNVDFTVDTNGVYSEPRPIGTRYLTRNL

SEQ ID NO: 12721 - protein, 735 aa, Artificial Sequence
  source: /note="Description of Artificial Sequence: Synthetic polypeptide"
MAADGYLPDWLEDTLSEGIRQWWKLKPGPPPPKPAERHKDDGRGLVLPGYKYLGPFNGLDKGEPVNEADAAALEHDKAYDRQLDSGDNPYLKYNHADAEFQERLKEDTSFGGNLGRAVFQAKKRVLEPLGLVEEPVKTAPGKKRPVEHSPVEPDSSSGTGKAGQQPARKRLNFGQTGDADSVPDPQPLGQPPAAPTSLGSTTMATGSGAPMADNNEGADGVGNSSGNWHCDSQWLGDRVITTSTRTWALPTYNNHLYKQISSQSGASNDNHYFGYSTPWGYFDFNRFHCHFSPRDWQRLINNNWGFRPKRLNFKLFNIQVKEVTQNDGTTTIANNLTSTVQVFTDSEYQLPYVLGSAHQGCLPPFPADVFMVPQYGYLTLNNGSQAVGRSSFYCLEYFPSQMLRTGNNFTFSYTFEDVPFHSSYAHSQSLDRLMNPLIDQYLYYLNKTQSNSGTLQQSRLLFSQAGPTSMSLQAKNWLPGPCYRQQRLSKQANDNNNSNFPWTAATKYHLNGRDSLVNPGPAMASHKDDEEKFFPMHGTLIFGKQGTNANDADLDNVMITDEEEIRTTNPVATEQYGTVSNNLQNSNTGPTTGTVNHQGALPGMVWQDRDVYLQGPIWAKIPHTDGHFHPSPLMGGFGLKHPPPQIMIKNTPVPANPPTNFSSAKFASFITQYSTGQVSVEIEWELQKENSKRWNPEIQYTSNYNKSVNVDFTVDTNGVYSEPRPIGTRYLTRNL

SEQ ID NO: 12722 - protein, 735 aa, Artificial Sequence
  source: /note="Description of Artificial Sequence: Synthetic polypeptide"
MAADGYLPDWLEDTLSEGIRQWWKLKPGPPPPKPAERHKDDSRGLVLPGYKYLGPFNGLDKGEPVNEADAAALEHDKAYDRQLDSGDNPYLKYNHADAELQERLKEDTSFGGNLGRAVFQAKKRVLEPLGLVEEPVKTAPGKKRPVEHSPVEPDSSSGTGKAGQQPARKRLNFGQTGDADSVPDPQPLGQPPAAPTSLGSTTMATGSGAPMADNNEGADGVGNSSGNWHCDSQWLGDRVITTSTRTWALPTYNNHLYKQISSQSGASNDNHYFGYSTPWGYFDFNRFHCHFSPRDWQRLINNNWGFRPKRLNFKLFNIQVKEVTQNDGTTTIANNLTSTVQVFTDSEYQLPYVLGSAHQGCLPPFPADVFMVPQYGYLTLNNGSQAVGRSSFYCLEYFPSQMLRTGNNFTFSYTFEDVPFHSSYAHSQSLDRLMNPLIDQYLYYLNKTQSNSGTLQQSRLLFSQAGPTSMSLQAKNWLPGPCYRQQRLSKQANDNNNSNFPWTAATKYHLNGRDSLVNPGPAMASHKDDEEKFFPMHGTLIFGKQGTNANDADLDNVMITDEEEIRTTNPVATEQYGTVSNNLQNSNTGPTTGTVNHQGALPGMVWQDRDVYLQGPIWAKIPHTDGHFHPSPLMGGFGLKHPPPQIMIKNTPVPANPPTNFSSAKFASFITQYSTGQVSVEIEWELQKENSKRWNPEIQYTSNYNKSVNVDFTVDTNGVYSEPRPIGTRYLTRNL

SEQ ID NO: 12723 - protein, 735 aa, Artificial Sequence
  source: /note="Description of Artificial Sequence: Synthetic polypeptide"
MAADGYLPDWLEDTLSEGIRQWWKLKPGPPPPKPAERHKDDSRGLVLPGYKYLGPFNGLDKGEPVNEADAAALEHDKAYDRQLDSGDNPYLKYNHADAEFQERLKEDTSFGGNLGRAVFQAKKRVLEPLGLVEEPVKTAPGKKRPVEHSPVEPDSSSGTGKAGQQPARKRLNFGQTGDADSVPDPQPLGQPPAAPTSLGSTTMATGSGAPMADNNEGADGVGNSSGNWHCDSQWLGDRVITTSTRTWALPTYNNHLYKQISSQSGASNDNHYFGYSTPWGYFDFNRFHCHFSPRDWQRLINNNWGFRPKRLNFKLFNIQVKEVTQNDGTTTIANNLTSTVQVFTDSEYQLPYVLGSAHQGCLPPFPADVFMVPQYGYLTLNNGSQAVGRSSFYCLEYFPSQMLRTGNNFTFSYTFEDVPFHSSYAHSQSLDRLMNPLIDQYLYYLNKTQSNSGTLQQSRLLFSQAGPTSMSLQAKNWLPGPCYRQQRLSKQANDNNNSNFPWTAATKYHLNGRDSLVNPGPAMASHKDDEEKFFPMHGTLIFGKQGTNANDADLDNVMITDEEEIRTTNPVATEQYGTVSNNLQNSNTGPTTGTVNHQGALPGMVWQDRDVYLQGPIWAKIPHTDGHFHPSPLVGGFGLKHPPPQIMIKNTPVPANPPTNFSSAKFASFITQYSTGQVSVEIEWELQKENSKRWNPEIQYTSNYNKSVNVDFTVDTNGVYSEPRPIGTRYLTRNL

SEQ ID NO: 12724 - protein, 735 aa, Artificial Sequence
  source: /note="Description of Artificial Sequence: Synthetic polypeptide"
MAADGYLPDWLEDTLSEGIRQWWKLKPGPPPPKPAERHKDDSRGLVLPGYKYLGPFNGLDKGEPVNEADAAALEHDKAYDRQLDSGDNPYLKYNHADAEFQERLKEDTSFGGNLGRAVFQAKKRVLEPLGLVEEPVKTAPGKKRPVEHSPVEPDSSSGTGKAGQQPARKRLNFGQTGDADSVPDPQPLGQPPAAPTSLGSTTMATGSGAPMADNNEGADGVGNSSGNWHCDSQWLGDRVITTSTRTWALPTYNNHLYKQISSQSGASNDNHYFGYSTPWGYFDFNRFHCHFSPRDWQRLINNNWGFRPKRLNFKLFNIQVKEVTQNDGTTTIANNLTSTVQVFTDSEYQLPYVLGSAHQGCLPPFPADVFMVPQYGYLTLNNGSQAVGRSSFYCLEYFPSQMLRTGNNFTFSYTFEDVPFHSSYAHSQSLDRLMNPLIDQYLYYLNKTQSNSGTLQQSRLLFSQAGPTSMSLQAKNWLPGPCYRQQRLSKQANDNNNSNFPWTAATKYHLNGRDSLVNPGPAMASHKDDEEKFFPMHGTLIFGKQGTNANDADLDNVMITDEEEIRTTNPVATEQYGTVSNNLQNSNTGPTTGTVNHQGALPGMVWQDRDVYLQGPIWAKIPHTDGHFHPSPLMGGFGLKHPPPQIMIKNTPVPANPPTNFSSAKFASFITQYSTGQVGVEIEWELQKENSKRWNPEIQYTSNYNKSVNVDFTVDTNGVYSEPRPIGTRYLTRNL

SEQ ID NO: 12725 - protein, 735 aa, Artificial Sequence
  source: /note="Description of Artificial Sequence: Synthetic polypeptide"
MAADGYLPDWLEDTLSEGIRQWWKLKPGPPPPKPAERHKDDSRGLVLPGYKYLGPFNGLDKGEPVNEADAAALEHDKAYDRQLDSGDNPYLKYNHADAEFQERLKEDTSFGGNLGRAVFQAKKRVLEPLGLVEEPVKTAPGKKRPVEHSPVEPDSSSGTGKAGQQPARKRLNFGQTGDADSVPDPQPLGQPPAAPTSLGSTTMATGSGAPMADNNEGADGVGNSSGNWHCDSQWLGDRVITTSTRTWALPTYNNHLYKQISSQSGASNDNHYFGYSTPWGYFDFNRFHCHFSPRDWQRLINNNWGFRPKRLNFKLFNIQVKEVTQNDGTTTIANNLTSTVQVFTDSEYQPPYVLGSAHQGCLPPFPADVFMVPQYGYLTLNNGSQAVGRSSFYCLEYFPSQMLRTGNNFTFSYTFEDVPFHSSYAHSQSLDRLMNPLIDQYLYYLNKTQSNSGTLQQSRLLFSQAGPTSMSLQAKNWLPGPCYRQQRLSKQANDNNNSNFPWTAATKYHLNGRDSLVNPGPAMASHKDDEEKFFPMHGTLIFGKQGTNANDADLDNVMITDEEEIRTTNPVATEQYGTVSNNLQNSNTGPTTGTVNHQGALPGMVWQDRDVYLQGPIWAKIPHTDGHFHPSPLMGGFGLKHPPPQIMIKNTPVPANPPTNFSSAKFASFITQYSTGQVSVEIEWELQKENSKRWNPEIQYTSNYNKSVNVDFTVDTNGVYSEPRPIGTRYLTRNL

SEQ ID NO: 12726 - protein, 735 aa, Artificial Sequence
  source: /note="Description of Artificial Sequence: Synthetic polypeptide"
MAADGYLPDWLEDTLSEGIRQWWKLKPGPPPPKPAERHKDDSRGLVLPGYKYLGPFNGLDKGEPVNEADAAALEHDKAYDRQLDSGDNPYLKYNHADAEFQERLKEDTSFGGNLGRAVFQAKKRVLEPLGLVEEPVKTAPGKKRPVEHSPVEPDSSSGTGKAGQQPARKRLNFGQTGDADSVPDPQPLGQPPAAPTSLGSTTMATGSGAPMADNDEGADGVGNSSGNWHCDSQWLGDRVITTSTRTWALPTYNNHLYKQISSQSGASNDNHYFGYSTPWGYFDFNRFHCHFSPRDWQRLINNNWGFRPKRLNFKLFNIQVKEVTQNDGTTTIANNLTSTVQVFTDSEYQLPYVLGSAHQGCLPPFPADVFMVPQYGYLTLNNGSQAVGRSSFYCLEYFPSQMLRTGNNFTFSYTFEDVPFHSSYAHSQSLDRLMNPLIDQYLYYLNKTQSNSGTLQQSRLLFSQAGPTSMSLQAKNWLPGPCYRQQRLSKQANDNNNSNFPWTAATKYHLNGRDSLVNPGPAMASHKDDEEKFFPMHGTLIFGKQGTNANDADLDNVMITDEEEIRTTNPVATEQYGTVSNNLQNSNTGPTTGTVNHQGALPGMVWQDRDVYLQGPIWAKIPHTDGHFHPSPLMGGFGLKHPPPQIMIKNTPVPANPPTNFSSAKFASFITQYSTGQVSVEIEWELQKENSKRWNPEIQYTSNYNKSVNVDFTVDTNGVYSEPRPIGTRYLTRNL

SEQ ID NO: 12727 - protein, 735 aa, Artificial Sequence
  source: /note="Description of Artificial Sequence: Synthetic polypeptide"
MAADGYLPDWLEDTLSEGIRQWWKLKPGPPPPKPAERHKDDSRGLVLPGYKYLGPFNGLDKGEPVNEADAAALEHDKAYDRQLDSGDNPYLKYNHADAEFQERLKEDTSFGGNLGRAVFQAKKRVLEPLGLVEEPVKTAPGKKRPVEHSPVEPDSSSGTGKAGQQPARKRLNFGQTGDADSVPDPQPLGQPPAAPTSLGSTTMATGSGAPMADNNEGADGVGNSSGNWHCDSQWLGDRVITTSTRTWALPTYNNHLYKQISSQSGASNDNHYFGYSTPWGYFDFNRFHCHFSPRDWQRLINNNWGFRPKRLNFKLFNIQVKEVTQNDGTTTIANNLTSTVQVFTDSEYQLPYVLGSAHQGCLPPFPADVFMVPQYGYLTLNNGSQAVGRSSFYCLEYFPSQMLRTGNNFTFSYTFEDVPFHSSYAHSQSLDRLMNPLIDQYLYYLNKTQSNSGTLQQSRLLFSQAGPTSMSLQAKNWLPGPCYRQQRLPKQANDNNNSNFPWTAATKYHLNGRDSLVNPGPAMASHKDDEEKFFPMHGTLIFGKQGTNANDADLDNVMITDEEEIRTTNPVATEQYGTVSNNLQNSNTGPTTGTVNHQGALPGMVWQDRDVYLQGPIWAKIPHTDGHFHPSPLMGGFGLKHPPPQIMIKNTPVPANPPTNFSSAKFASFITQYSTGQVSVEIEWELQKENSKRWNPEIQYTSNYNKSVNVDFTVDTNGVYSEPRPIGTRYLTRNL

SEQ ID NO: 12728 - protein, 735 aa, Artificial Sequence
  source: /note="Description of Artificial Sequence: Synthetic polypeptide"
MAADGYLPDWLEDTLSEGIRQWWKLKPGPPPPKPAERHKDDSRGLVLPGYKYLGPFNGLDKGEPVNEADAAALEHDKAYDRQLDSGDNPYLKYNHADAEFQERLKEDTSFGGNLGRAVFQAKKRVLEPLGLVEEPVKTAPGKKRPVEHSPVEPDSSSGTGKAGQQPARKRLNFGQTGDADSVPDPQPLGQPPAAPTSLGSTTMATGSGAPMADNNEGADGVGNSSGNWHCDSQWLGDRVITTSTRTWALPTYNNHLYKQISSQSGASNDNHYFGYSTPWGYFDFNRFHCHFSPRDWQRLINNNWGFRPKRLNFKLFNIQVKEVTQNDGTTTIANNLTSTVQVFTDSEYQLPYVLGSAHQGCLPPFPADVFMVPQYGYLTLNNGSQAVGRSSFYCLEYFPSQMLRTGNNFTFSYTFEDVPFHSSYAHSQSLDRLMNPLIDQYLYYLNKTQSNSGTLQQSRLLFSQAGPTSMSLQAKNWLPGPCYRQQRLSKQANDNNNSNFPWTAATKYHLNGRDSLVNPGPAMASHKDDEEKFFPMHGTLIFGKQGTNANDADLDNVMITDEEEIRTTNPVATEQYGTVSNNLQNSNTGPTTGTVNHQGALPGMVWQDRDVYLQGPIWAKIPHTDGHFHPSPLMGGFGLKHPPPQIMIKNTPVPANPPTNLSSAKFASFITQYSTGQVSVEIEWELQKENSKRWNPEIQYTSNYNKSVNVDFTVDTNGVYSEPRPIGTRYLTRNL

SEQ ID NO: 12729 - protein, 735 aa, Artificial Sequence
  source: /note="Description of Artificial Sequence: Synthetic polypeptide"
MAADGYLPDWLEDTLSEGIRQWWKLKPGPPPPKPAERHKDDSRGLVLPGYKYLGPFNGLDKGEPVNEADAAALEHDKAYDRQLDSGDNPYLKYNHADAEFQERLKEDTSFGGNLGRAVFQAKKRVLEPLGLVEEPVKTAPGKKRPVEHSPVEPDSSSGTGKAGQQPARKRLNFGQTGDADSVPDPQPLGQPPAAPTSLGSTTMATGSGAPMADNNEGADGVGNSSGNWHCDSQWLGDRVITTSTRTWALPTYNNHLYKQISSQSGASNDNHYFGYSTPWGYFDFNRFHCHFSPRDWQRLINNNWGFRPKRLNFKLFNIQVKEVTQNDGTTTIANNLTSTVQVFTDSEYQLPYVLGSAHQGCLPPFPADVFMVPQYGYLTPNNGSQAVGRSSFYCLEYFPSQMLRTGNNFTFSYTFEDVPFHSSYAHSQSLDRLMNPLIDQYLYYLNKTQSNSGTLQQSRLLFSQAGPTSMSLQAKNWLPGPCYRQQRLSKQANDNNNSNFPWTAATKYHLNGRDSLVNPGPAMASHKDDEEKFFPMHGTLIFGKQGTNANDADLDNVMITDEEEIRTTNPVATEQYGTVSNNLQNSNTGPTTGTVNHQGALPGMVWQDRDVYLQGPIWAKIPHTDGHFHPSPLMGGFGLKHPPPQIMIKNTPVPANPPTNFSSAKFASFITQYSTGQVSVEIEWELQKENSKRWNPEIQYTSNYNKSVNVDFTVDTNGVYSEPRPIGTRYLTRNL

SEQ ID NO: 12730 - protein, 735 aa, Artificial Sequence
  source: /note="Description of Artificial Sequence: Synthetic polypeptide"
MAADGYLPDWLEDTLSEGIRQWWKLKPGPPPPKPAERHKDDSRGLVLPGYKYLGPFNGLDKGEPVNEADAAALEHDKAYDRQLDSGDNPYLKYNHADAEFQERLKEDTSFGGNLGRAVFQAKKRVLEPLGLVEEPVKTAPGKKRPVEHSPVEPDSSSGTGKAGQQPARKRLNFGQTGDADSVPDPQPLGQPPAAPTSLGSTTMATGSGAPMADNNEGADGVGNSSGNWHCDSQWLGDRVITTSTRTWALPTYNNHLYKQISSQSGASNDNHYFGYSTPWGYFDFNRFHCHFSPRDWQRLINNNWGFRPKRLNFKLFNIQVKEVTQNDGTTTIANNLTSTVQVFTDSEYQLPYVLGSAHQGCLPPFPADVFMVPQYGYLTLNNGSQAVGRSSFYCLEYFPSQMLRTGNNFTFSYTFEDVPFHSSYAHSQSLDRLMNPLIDQYLYYLNKTQSNSGTLRQSRLLFSQAGPTSMSLQAKNWLPGPCYRQQRLSKQANDNNNSNFPWTAATKYHLNGRDSLVNPGPAMASHKDDEGKFFPMHGTLIFGKQGTNANDADLDNVMITDEEEIRTTNPVATEQYGTVSNNLQNSNTGPTTGTVNHQGALPGMVWQDRDVYLQGPIWAKIPHTDGHFHPSPLMGGFGLKHPPPQIMIKNTPVPANPPTNFSSAKFASFITQYSTGQVSVEIEWELQKENSKRWNPEIQYTSNYNKSVNVDFTVDTNGVYSEPRPIGTRYLTRNL

SEQ ID NO: 12731 - protein, 735 aa, Artificial Sequence
  source: /note="Description of Artificial Sequence: Synthetic polypeptide"
MAADGYLPDWLEDTLSEGIRQWWKLKPGPPPPKPAERHKDDSRGLVLPGYKYLGPFNGLDKGEPVNEADAAALEHDKAYDRQLDSGDNPYLKYNHADAEFQERLKEDTSFGGNLGRAVFQAKKRVLEPLGLVEEPVKTAPGKKRPVEHSPVEPDSSSGTGKAGQQPARKRLNFGQTGDADSVPDPQPLGQPPAAPTSLGSTTMATGSGAPMADNNEGADGVGNSSGNWHCDSQWLGDRVITTSTRTWALPTYNNHLYKQISSQSGASNDNHYFGYSTPWGYFDFNRFHCHFSPRDWQRLINNNWGFRPKRLNFKLFNIQVKEVTQNDGTTTIANNLTSTVQVFTDSEYQLPYVLGSAHQGCLPPFPADVFMVPQYGYLTLNNGSQAVGRSSFYCLEYFPSQMLRTGNNFTFSYTFEDVPFHSSYAHSQSLDRLMNPLIDQYLYYLNKTQSNSGTLQQSRLLFSQAGPTSMSLQAKNWLPGPCYRQQRLSKQANDNNNSNFPWTAATKYHLNGRDSLVNPGPAMASHKDDEEKFFPMHGTLIFGKQGTNANDADLDNAMITDEEEIRTTNPVATEQYGTVSNNLQNSNTGPTTGTVNHQGALPGMVWQDRDVYLQGPIWAKIPHTDGHFHPSPLMGGFGLKHPPPQIMIKNTPVPANPPTNFSSAKFASFITQYSTGQVSVEIEWELQKENSKRWNPEIQYTSNYNKSVNVDFTVDTNGVYSEPRPIGTRYLTRNL

SEQ ID NO: 12732 - protein, 735 aa, Artificial Sequence
  source: /note="Description of Artificial Sequence: Synthetic polypeptide"
MAADGYLPDWLEDTLSEGIRQWWKLKPGPPPPKPAERHKDDSRGLVLPGYKYLGPFNGLDKGEPVNEADAAALEHDKAYDRQLDSGDNPYLKYNHADAEFQERLKEDTSFGGNLGRAVFQAKKRVLEPLGLVEEPVKTAPGKKRPVEHSPVEPDSSSGTGKAGQQPARKRLNFGQTGDADSVPDPQPLGQPPAAPTSLGSTTMATGSGAPMAGNNEGADGVGNSSGNWHCDSQWLGDRVITTSTRTWALPTYNNHLYKQISSQSGASNDNHYFGYSTPWGYFDFNRFHCHFSPRDWQRLINNNWGFRPKRLNFKLFNIQVKEVTQNDGTTTIANNLTSTVQVFTDSEYQLPYVLGSAHQGCLPPFPADVFMVPQYGYLTLNNGSQAVGRSSFYCLEYFPSQMLRTGNNFTFSYTFEDVPFHSSYAHSQSLDRLMNPLIDQYLYYLNKTQSNSGTLQQSRLLFSQAGPTSMSLQAKNWLPGPCYRQQRLSKQANDNNNSNFPWTAATKYHLNGRDSLVNPGPAMASHKDDEEKFFPMHGTLIFGKQGTNANDADLDNVMITDEEEIRTTNPVATEQYGTVSNNLQNSNTGPTTGTVNHQGALPGMVWQDRDVYLQGPIWAKIPHTDGHFHPSPLMGGFGLKHPPPQIMIKNTPVPANPPTNFSSAKFASFITQYSTGQVSVEIEWELQKENSKRWNPEIQYTSNYNKSVNVDFTVDTNGVYSEPRPIGTRYLTRNL

SEQ ID NO: 12733 - protein, 735 aa, Artificial Sequence
  source: /note="Description of Artificial Sequence: Synthetic polypeptide"
MAADGYLPDWLEDTLSEGIRQWWKLKPGPPPPKPAERHKDDSRGLVLPGYKYLGPFNGLDKGEPVNEADAAALEHDKAYDRQLDSGDNPYLKYNHADAEFQERLKEDTSFGGNLGRAVFQAKKRVLEPLGLVEEPVKTAPGKKRPVEHSPVEPDSSSGTGKAGQQPARKRLNFGQTGDADSVPDPQPLGQPPAAPTSLGSTTMATGSGAPMADNNEGADGVGNSSGNWHCDSQWLGDRVITTSTRTWALPTYNNHLYKQISSQSGASNDNHYFGYSTPWGYFDFNRFHCHFSPRDWQRLINNNWGFRPKRLNFKLFNIQVKEVAQNDGTTTIANNLTSTVQVFTDSEYQLPYVLGSAHQGCLPPFPADVFMVPQYGYLTLNNGSQAVGRSSFYCLEYFPSQMLRTGNNFTFSYTFEDVPFHSSYAHSQSLDRLMNPLIDQYLYYLNKTQSNSGTLQQSRLLFSQAGPTSMSLQAKNWLPGPCYRQQRLSKQANDNNNSNFPWTAATKYHLNGRDSLVNPGPAMASHKDDEEKFFPMHGTLIFGKQGTNANDADLDNVMITDEEEIRTTNPVATEQYGTVSNNLQNSNTGPTTGTVNHQGALPGMVWQDRDVYLQGPIWAKIPHTDGHFHPSPLMGGFGLKHPPPQIMIKNTPVPANPPTNFSSAKFASFITQYSTGQVSVEIEWELQKENSKRWNPEIQYTSNYNKSVNVDFTVDTNGVYSEPRPIGTRYLTRNL

SEQ ID NO: 12734 - protein, 735 aa, Artificial Sequence
  source: /note="Description of Artificial Sequence: Synthetic polypeptide"
MAADGYLPDWLEDTLSEGIRQWWKLKPGPPPPKPAERHKDDSRGLVLPGYKHLGPFNGLDKGEPVNEADAAALEHDKAYDRQLDSGDNPYLKYNHADAEFQERLKEDTSFGGNLGRAVFQAKKRVLEPLGLVEEPVKTAPGKKRPVEHSPVEPDSSSGTGKAGQQPARKRLNFGQTGDADSVPDPQPLGQPPAAPTSLGSTTMATGSGAPMADNNEGADGVGNSSGNWHCDSQWLGDRVITTSTRTWALPTYNNHLYKQISSQSGASNDNHYFGYSTPWGYFDFNRFHCHFSPRDWQRLINNNWGFRPKRLNFKLFNIQVKEVTQNDGTTTIANNLTSTVQVFTDSEYQLPYVLGSAHQGCLPPFPADVFMVPQYGYLTLNNGSQAVGRSSFYCLEYFPSQMLRTGNNFTFSYTFEDVPFHSSYAHSQSLDRLMNPLIDQYLYYLNKTQSNSGTLQQSRLLFSQAGPTSMSLQAKNWLPGPCYRQQRLSKQANDNNNSNFPWTAATKYHLNGRDSLVNPGPAMASHKDDEEKFFPMHGTLIFGKQGTNANDADLDNVMITDEEEIRTTNPVATEQYGTVSNNLQNSNTGPTTGTVNHQGALPGMVWQDRDVYLQGPIWAKIPHTDGHFHPSPLMGGFGLKHPPPQIMIKNTPVPANPPTNFSSAKFASFITQYSTGQVSVEIEWELQKENSKRWNPEIQYTSNYNKSVNVDFTVDTNGVYSEPRPIGTRYLTRNL

SEQ ID NO: 12735 - protein, 735 aa, Artificial Sequence
  source: /note="Description of Artificial Sequence: Synthetic polypeptide"
MAADGYLPDWPEDTLSEGIRQWWKLKPGPPPPKPAERHKDDSRGLVLPGYKYLGPFNGLDKGEPVNEADAAALEHDKAYDRQLDSGDNPYLKYNHADAEFQERLKEDTSFGGNLGRAVFQAKKRVLEPLGLVEEPVKTAPGKKRPVEHSPVEPDSSSGTGKAGQQPARKRLNFGQTGDADSVPDPQPLGQPPAAPTSLGSTTMATGSGAPMADNNEGADGVGNSSGNWHCDSQWLGDRVITTSTRTWALPTYNNHLYKQISSQSGASNDNHYFGYSTPWGYFDFNRFHCHFSPRDWQRLINNNWGFRPKRLNFKLFNIQVKEVTQNDGTTTIANNLTSTVQVFTDSEYQLPYVLGSAHQGCLPPFPADVFMVPQYGYLTLNNGSQAVGRSSFYCLEYFPSQMLRTGNNFTFSYTFEDVPFHSSYAHSQSLDRLMNPLIDQYLYYLNKTQSNSGTLQQSRLLFSQAGPTSMSLQAKNWLPGPCYRQQRLSKQANDNNNSNFPWTAATKYHLNGRDSLVNPGPAMASHKDDEEKFFPMHGTLIFGKQGTNANDADLDNVMITDEEEIRTTNPVATEQYGTVSNNLQNSNTGPTTGTVNHQGALPGMVWQDRDVYLQGPIWAKIPHTDGHFHPSPLMGGFGLKHPPPQIMIKNTPVPANPPTNFSSAKFASFITQYSTGQVSVEIEWELQKENSKRWNPEIQYTSNYNKSVNVDFTVDTNGVYSEPRPIGTRYLTRNL

SEQ ID NO: 12736 - protein, 735 aa, Artificial Sequence
  source: /note="Description of Artificial Sequence: Synthetic polypeptide"
MAADGYLPDWLEDTLSEGIRQWWKLKPGPPPPKPAERHKDDSRGLVLPGYKYLGPFNGLDKGEPVNEADAAALEHDKAYDRQLDSGDNPYLKYNHADAEFQERLKEDTSFGGNLGRAVFQAKKRVLEPLGLVEEPVKTAPGKKRPVEHSPVEPDSSSGTGKAGQQPARKRLNFGQTGDADSVPDPQPLGQPPAAPTSLGSTTMATGSGAPMADNNEGADGVGNSSGNWHCDSQWLGDRVITTSTRTWALPTYNNHLYKQISSQSGASNDNHYFGYSTPWGYFDFNRFHCHFSPRDWQRLINNNWGFRPKRLNFKLFNIQVKEVTQNDGTTTIANNLTSTVQVFTDSEYQLPYVLGSAHQGCLPPFPADVFMVPQYGYLTLNNGSQAVGRSSFYCLEYFPSQMLRTGNNFTFSYTFEDVPFHSSYAHSQSLDRLMNPLIDQYLYYLNKTQSNSGTLQQSRLLFSQAGPTSMSLQAKNWLPGPCYRQQRLSKQANDNNNSNFPWTAATKYHLNGRDSLVNPGPAMASHKDDEEKFFPMHGTLIFGKQGTNANDADLDNVMITDEEEIRTTNPVATEQYGTVSNNLQNSNTGPTTGTVNHQGALPGMVWQDRGVYLQGPIWAKIPHTDGHFHPSPLMGGFGLKHPPPQIMIKNTPVPANPPTNFSSAKFASFITQYSTGQVSVEIEWELQKENSKRWNPEIQYTSNYNKSVNVDFTVDTNGVYSEPRPIGTRYLTRNL

SEQ ID NO: 12737 - protein, 735 aa, Artificial Sequence
  source: /note="Description of Artificial Sequence: Synthetic polypeptide"
MAADGYLPDWLEDTLSEGIRQWWKLKPGPPPPKPAERHKDDSRGLVLPGYKYLGPFNGLDKGEPVNEADAAALEHDKAYDRQLDSGDNPYLKYNHADAEFQERLKEDTSFGGNLGRAVFQAKKRVLEPLGLVEEPVKTAPGKKRPVEHSPVEPDSSSGTGKAGQQPARKRLNFGQTGDADSVPDPQPLGQPPAAPTSLGSTTMATGSGAPMADNNEGADGVGNSSGNWHCDSQWLGDRVITTSTRTWALPTYNNHLYKQISSQSGASNDNHYFGYSTPWGYFDFNRFHCHFSPRDWQRLINNNWGFRPKRLNFKLFNIQVKEVTQNDGTTTIANNLTSTVQVFTDSEYQLPYVLGSAHQGCLPPFPADVFMVPQYGYLTLNNGSQAVGRSSFYCLEYFPSQMLRTGNNFTFSYTFEDVPFHSSYAHSQSLDRLMNPLIDQYLYYLNKTQSNSGTLQQSRLLFSQAGPTSMSLQAKNWLPGPCYRQQRLSKQANDNNNSNFPWTAATKYHLNGRDSLVNPGPAMASHKDDEEKFFPMHGTLIFGKQGTNANDADLDNVMITDEEEIRTTNPVATEQYGTVSNNLQNSNTGPTTGTVNHQGALPGMVWQDRDVYLQGPIWAKIPHTDGHFHPSPLMGGFGLKHPPPQIMIKNTPVPANPPTNFSSAKFASFITQYSTGQVSVEIEWELQKENSKRWNPEIQYTSNYNKSVNVDFTVGTNGVYSEPRPIGTRYLTRNL

SEQ ID NO: 12738 - protein, 735 aa, Artificial Sequence
  source: /note="Description of Artificial Sequence: Synthetic polypeptide"
MAADGYLPDWLEDTLSEGIRQWWKLKPGPPPPKPAERHQDDSRGLVLPGYKYLGPLNGLDKGEPVNEADAAALEHDKAYDRQLDSGDNPYLKYNHADAEFQERLKEDTSFGGNLGRAVFQAKKRVLEPLGLVEEPVKTAPGKKRPVEHSPAEPDSSSGTGKAGQQPARKRLNFGQTGDADSVPDPQPLGQPPAAPTSLGSTTMATGSGAPMADNNEGADGVGNSSGNWHCDSQWLGDRVITTSTRTWALPTYNNHLYKQISSQSGASNDNHYFGYSTPWGYFDFNRFHCHFSPRDWQRLINNNWGFRPKRLNFKLFNIQVKEVTQNDGTTTIANNLTSTVQVFTDSEYQLPYVLGSAHQGCLPPFPADVFMVPQYGYLTLNNGSQAVGRSSFYCLEYFPSQMLRTGNNFTFSYTFEDVPFHSSYAHSQSLDRLMNPLIDQYLYYLNRTQSNSGTLQQSRLLFSQAGPTSMSLQAKNWLPGPCYRQQRLSKQANDNNNSNFPWTAATKYHLNGRDSLVNPGPAMASHKDDEEKFFPMHGTLIFGKQGTNANDADLEHVMITDEEEIRTTNPVATEQYGNVSNNLQNSNTGPTTENVNHQGALPGMVWQDRDVYLQGPIWAKIPHTDGHFHPSPLMGGFGLKHPPPQIMIKNTPVPANPPTNFSAAKFASFITQYSTGQVSVEIEWELQKENSKRWNPEIQYTSNYNKSVNVDFTVDTNGVYSEPRPIGTRYLTRNL

SEQ ID NO: 12739 - protein, 735 aa, Artificial Sequence
  source: /note="Description of Artificial Sequence: Synthetic polypeptide"
MAADGYLPDWLEDTLSEGIRQWWKLKPGPPPPKPAERHQDDSRGLVLPGYKYLGPFNGLDKGEPVNEADAAALEHDKAYDRQLDSGDNPYLKYNHADAEFQERLKEDTSFGGNLGRAVFQAKKRVLEPLGLVEEPVKTAPGKKRPVEHSPAEPDSSSGTGKAGQQPARKRLNFGQTGDADSVPDPQPLGQPPAAPTSLGSTTMATGSGAPMADNNEGADGVGNSSGNWHCDSQWLGDRVITTSTRTWALPTYNNHLYKQISSQSGASNDNHYFGYSTPWGYFDFNRFHCHFSPRDWQRLINNNWGFRPKRLNFKLFNIQVKEVTQNDGTTTIANNLTSTIQVFTDSEYQLPYVLGSAHQGCLPPFPADVFMVPQYGYLTLNNGSQAVGRSSFYCLEYFPSQMLRTGNNFTFSYTFEDVPFHSSYAHSQSLDRLMNPLIDQYLYYLNRTQSNSGTLQQSRLLFSQAGPTSMSLQAKNWLPGPCYRQQRLSKQANDNNNSNFPWTAATKYHLNGRDSLVNPGPAMASHKDDEEKFFPMHGTLIFGKQGTNANDADLEHVMITDEEEIRTTNPVATEQYGNVSNNLQNSNTGPTTENVNHQGALPGMVWQDRDVYLQGPIWAKIPHTDGHFHPSPLMGGFGLKHPPPQIMIKNTPVPANPPTNFSAAKFASFITQYSTGQVSVEIEWELQKENSKRWNPEIQYTSNYNKSVNVDFTVDTNGVYSEPRPIGTRYLTRNL

SEQ ID NO: 12740 - protein, 735 aa, Artificial Sequence
  source: /note="Description of Artificial Sequence: Synthetic polypeptide"
MAADGYLPDWLEDTLSEGIRQWWKLKPGPPPPKPAERHQDDSRGLVLPGYKYLGPFNGLDKGEPVNEADAAALEHDKAYDRQLDSGDNPYLKYNHADAEFQERLKEDTSFGGNLGRAVFQAKKRVLEPLGLVEEPVKTAPGKKRPVGHSPAEPDSSSGTGKAGQQPARKRLNFGQTGDADSVPDPQPLGQPPAAPTSLGSTTMATGSGAPMADNNEGADGVGNSSGNWHCDSQWLGDRVITTSTRTWALPTYNNHLYKQISSQSGASNDNHYFGYSTPWGYFDFNRFHCHFSPRDWQRLINNNWGFRPKRLNFKLFNIQVKEVTQNDGTTTIANNLTSTVQVFTDSEYQLPYVLGSAHQGCLPPFPADVFMVPQYGYLTLNNGSQAVGRSSFYCLEYFPSQMLRTGNNFTFSYTFEDVPFHSSYAHSQSLDRLMNPLIDQYLYYLNRTQSNSGTLQQSRLLFSQAGPTSMSLQAKNWLPGPCYRQQRLSKQANDNNNSNFPWTAATKYHLNGRDSLVNPGPAMASHKDDEEKFFPMHGTLIFGKQGTNANDADLEHVMITDEEEIRTTNPVATEQYGNVSNNLQNSNTGPTTENVNHQGALPGMVWQDRDVYLQGPIWAKIPHTDGHFHPSPLMGGFGLKHPPPQIMIKNTPVPANPPTNFSAAKFASFITQYSTGQVSVEIEWELQKENSKRWNPEIQYTSNYNKSVNVDFTVDTNGVYSEPRPIGTRYLTRNL

SEQ ID NO: 12741 - protein, 735 aa, Artificial Sequence
  source: /note="Description of Artificial Sequence: Synthetic polypeptide"
MAADGYLPDWLEDTLSEGIRQWWKLKPGPPPPKPAERHQDDSRGLVLPGYKYLGPFNGLDKGEPVNEADAAALEHDKAYDRQLDSGDNPYLKYNHADAEFQERLKEDTSFGGNLGRAVFQAKKRVLEPLGLVEEPVKTAPGKKRPVEHSPAEPDSSSGTGKAGQQPARKRLNFGQTGDADSVPDPQPLGQPPAAPTSLGSTTMATGSGAPMADNNEGADGVGNSSGNWHCDSQWLGDRVITTSTRTWALPTYNNHLYKQISSQSGASNDNHYFGYSTPWGYFDFNRFHCHFSPRDWQRLINNNWGFRPKRLNFKLFNIQVKEVTQNDGTTTIANNLTSTVQVFTDSEYQLPYVLGSAHQGCLPPFPADVFMVPQYGYLTLNNGSQAVGRSSFYCLEYFPSQMLRTGNNFTFSYTFEDVPFHSSYAHSQSLDRLMNPLIDQYLYYLNRTQSNSGTLQQSRLLFSQAGPTSMSLQAKNWLPGPCYRQQRLSKQANDNNNSNFPWTAATKYHLNGRDSLVNPGPAMASHKDDEEKFFPMHGTLIFGKQGTNANDADLEHVMITDEEEIRTTNPVATEQYGNVSNNLQNSNTGPTTENVNHQGALPGMVWQDRDVYLQGPIWAKIPHTDGHFHPSPLMGGFGLKHPPPQIMIKNTPVPANPPTNFSAAKFASFITQYSTGQVSVEIERELQKENSKRWNPEIQYTSNYNKSVNVDFTVDTNGVYSEPRPIGTRYLTRNL

SEQ ID NO: 12742 - protein, 735 aa, Artificial Sequence
  source: /note="Description of Artificial Sequence: Synthetic polypeptide"
MAADGYLPDWLEDTLSEGIRQWWKLKPGPPPPKPAERHQDDSRGLVLPGYKYLGPFNGLDKGEPVNEADAAALEHDKAYDRQLDSGDNPYLKYNHADAEFQERLKEDTSFGGNLGRAVFQAKKRVLEPLGLVEEPVKTAPGKKRPVEHSPAEPDSSSGTGKAGQQPARKRLNFGQTGDADSVPDPQPLGQPPAAPTSLGSTTMATGSGAPMADNNEGADGVGNSSGNWHCDSQWLGDRVITTSTRTWALPTYNNHLYKQISSQSGASNDNHYFGYSTPWGYFDFNRFHCHFSPRDWQRLINNNWGFRPKRLNFKLFNIQVKEVTQNDGTTTIANNLTSTVQVFTDSEYQLPYVLGSAHQGCLPPFPADVFMVPQYGYLTLNNGSQAVGRSSFYCLEYFPSQMLRTGNNFTFSYTFEDVPFHSSYAHSQSLDRLMNPLIDQYLYYLNRTQSNSGTLQQSRLLFSQAGPTSMSLQAKNWLPGPCYRQQRLSKQANDNNNSNFPWTAATKYHLNGRDSLVNPGPAMASHKDDEEKFFPMHGTLIFGKQGTNANDADLEHVMITDEEEIRTTNPVATEQYGNVSNNLQNSNTGPTTENVNHQGALPGMVWQDRDVYLQGPIWAKIPHTDGHFHPSPLMGGFGLKHPPPQIMIKNTPVPANPPTNFSAAKFASFITQYSTGQVSVEIEWELQKENSKRWNPEIQYTSNYNKSVNVDLTVDTNGVYSEPRPIGTRYLTRNL

SEQ ID NO: 12743 - protein, 735 aa, Artificial Sequence
  source: /note="Description of Artificial Sequence: Synthetic polypeptide"
MAADGYLPDWLEDTLSEGIRQWWKLKPGPPPPKPAERHKDDSRGLVLPGYKYLGPFNGLDKGEPVNEADAAALEHDKAYDRQLDSGDNPYLKYNHADAEFQERLKEDTSFGGNLGRAVFQAKKRVLEPLGLVEEPVKTAPGKKRPVEHSPVEPDSSSGTGKAGQQPARKRLNFGQTGDADSVPDPQPLGQPPAAPTSLGSTTMATGSGAPMADNNEGADGVGNSSGNWHCDSQWLGDRVITTSTRTWALPTYNNHLYKQISSQSGASNDNHYFGHSTPWGYFDFNRFHCHFSPRDWQRLINNNWGFRPKRLNFKLFNIQVKEVTQNDGTTTIANNLTSTVQVFTDSEYQLPYVLGSAHQGCLPPFPADVFMVPQYGYLTLNNGSQAVGRSSFYCLEYFPSQMLRTGNNFTFSYTFEDVPFHSSYAHSQSLDRLMNPLIDQYLYYLNKTQSNSGTLQQSRLLFSQAGPTSMSLQAKNWLPGPCYRQQRLSKQANDNNNSNFPWTAATKYHLNGRDSLVNPGPAMASHKDDEEKFFPMHGTLIFGKQGTNANDADLDNVMITDEEEIRTTNPVATEQYGTVSNNLQNSNTGPTTGTVNHQGALPGMVWQDRDVYLQGPIWAKIPHTDGHFHPSPLMGGFGLKHPPPQIMIKNTPVPANPPTNFSSAKFASFITQYSTGQVSVEIEWELQKENSKRWNPEIQYTSNYNKSVNVDFTVDTNGVYSEPRPIGTRYLTRNL

SEQ ID NO: 12744 - protein, 735 aa, Artificial Sequence
  source: /note="Description of Artificial Sequence: Synthetic polypeptide"
MAADGYLPDWLEDTLSEGIRQWWKLKPGPPPPKPAERHKDDSRGLVLPGYKYLGPFNGLDKGEPVNEADAAALEHDKAYDRQLDSGDNPYLKYNHADAEFQERLKEDTSFGGNLGRAVFQAKKRVLEPLGLVEEPVKTAPGKKRPVEHSPVEPDSSSGTGKAGQQPARKRLNFGQTGDADSVPDPQPLGQPPAAPTSLGSTTMATGSGAPMADNNEGADGVGNSSGNWHCDSQWLGDRVITTSTRTWALPTYNNHLYKQISSQSGAPNDNHYFGHSTPWGYFDFNRFHCHFSPRDWQRLINNNWGFRPKRLNFKLFNIQVKEVTQNDGTTTIANNLTSTVQVFTDSEYQLPYVLGSAHQGCLPPFPADVFMVPQYGYLTLNNGSQAVGRSSFYCLEYFPSQMLRTGNNFTFSYTFEDVPFHSSYAHSQSLDRLMNPLIDQYLYYLNKTQSNSGTLQQSRLLFSQAGPTSMSLQAKNWLPGPCYRQQRLSKQANDNNNSNFPWTAATKYHLNGRDSLVNPGPAMASHKDDEEKFFPMHGTLIFGKQGTNANDADLDNVMITDEEEIRTTNPVATEQYGTVSNNLQNSNTGPTTGTVNHQGALPGMVWQDRDVYLQGPIWAKIPHTDGHFHPSPLMGGFGLKHPPPQIMIKNTPVPANPPTNFSSAKFASFITQYSTGQVSVEIEWELQKENSKRWNPEIQYTSNYNKSVNVDFTVDTNGVYSEPRPIGTRYLTRNL

SEQ ID NO: 12745 - protein, 735 aa, Artificial Sequence
  source: /note="Description of Artificial Sequence: Synthetic polypeptide"
MAADGYLPDWLEDTLSEGIRQWWKLKPGPPPPKPAERHKDDSRGLVLPGYKYLGPFNGLDKGEPVNEADAAALEHDKAYDRQLDSGDNPYLKYNHADAEFQERLKEDTSFGGNLGRAVFQAKKRVLEPLGLVEEPVKTAPGKKRPVEHSPVEPDSSSGTGKAGQQPARKRLNFGQTGDADSVPDPQPLGQPPAAPTSLGSTTMATGSGAPMADNNEGADGVGNSSGNWHCDSQWLGDRVITTSTRTWALPTYNNHLYKQISSQSGASNDNHYFGHSTPWGYFDFNRFHCHFSPRDWQRLINNNWGFRPKRLNFKLFNIQVKEVTQNDGTTTIANNLTSTVQVFTDSEYQLPYVLGSAHQGCLPPFPADVFMVPQYGYLTLNNGSQAVGRSSFYCLEYFPSQMLRTGNNFTFSYTFEDVPFHSSYAHSQSLDRLMNPLIDQYLYYLNKTQSNSGTLQQSRLLFSQAGPTSMSLQAKNWLPGPCYRQQRLSKQANDNNNSNFPWTAATKYHLNGRDSLVNPGPAMASHKDDEEKFFPMHGTLIFGKQGTNANDADLDNVMITDEEEIRTTNPVATEQYGTVSNNLQNSNTGPTTGTVNHQGALPGMVWQDRDVYLQGPIWAKIPHTDGHFHPSPLMGGFGLKHPPPQIMIKNTPVPANPPTNFSSAKFASFITQYSTGQVGVEIEWELQKENSKRWNPEIQYTSNYNKSVNVDFTVDTNGVYSEPRPIGTRYLTRNL

SEQ ID NO: 12746 - protein, 735 aa, Artificial Sequence
  source: /note="Description of Artificial Sequence: Synthetic polypeptide"
MAADGYLPDWLEDTLSEGIRQWWKLKPGPPPPKPAERHKDDSRGLVLPGYKYLGPFNGLDKGEPVNEADAAALEHDKAYDRQLDSGDNPYLKYNHADAEFQERLKEDTSFGGNLGRAVFQAKKRVLEPLGLVEEPVKTAPGKKRPVEHSPVEPDSSSGTGKAGQQPARKRLNFGQTGDADSVPDPQPLGQPPAAPTSLGSTTMATGSGAPMADNNEGADGVGNSSGNWHCDSQWLGDRVITTSTRTWALPTYNNHLYKQISSQSGASNDNHYFGHSTPWGYFDFNRFHCHFSPRDWQRLINNNWGFRPKRLNFKLFNIQVKEVTQNDGTTTIANNLTSTVQVFTDSEYQLPYVLGSAHQGCLPPFPADVFMVPQYGYLTLNNGSQAVGRSSFYCLEYFPSQMLRTGNNFTFSYTFEDVPFHSSYAHSQSLDRLMNPLIDQYLYYLNKTNNQSGTFTQSRLLFSQAGPTSILFKSKNWLPGPCYRQQRLSKRANDNNNSNFPWTAATKYHLNGRDSLVNPGPAMASHKDDEEKFFPQHGTLIFGKQGTKLTDADLDNVMITDEEEIRTTNPVATEQYGTVSNNLQKLNILATTGTVNTQGALPGMVWQDRDVYLQGPIWAKIPHTDGHFHPSPLMGGFGLKHPPPQIMIKNTPVPANPPTNFSSAKFASFITQYSTGQVSVEIEWELQKENSKRWNPEIQYTSNYNKSVNVDFTVDTNGVYSEPRPIGTRYLTRNL

SEQ ID NO: 12747 - protein, 735 aa, Artificial Sequence
  source: /note="Description of Artificial Sequence: Synthetic polypeptide"
MAADGYLPDWLEDTLSEGIRQWWKLKPGPPPPKPAERHKDASRGLVLPGYKYLGPFNGLDKGEPVNEADAAALEHDKAYDRQLDSGDNPYLKYNHADAEFQERLKEDTSFGGNLGRAVFQAKKRVLEPLGLVEEPVKTAPGKKRPVEHSPVEPDSSSGTGKAGQQPARKRLNFGQTGDADSVPDPQPLGQPPAAPTSLGSTTMATGSGAPMADNNEGADGVGNSSGNWHCDSQWLGDRVITTSTRTWALPTYNNHLYKQISSQSGASNDNHYFGYSTPWGYFDFNRFHCHFSPRDWQRLINNNWGFRPKRLNFKLFNIQVKEVTQNDGTTTIANNLTSTVQVFTDSEYQLPYVLGSAHQGCLPPFPADVFMVPQYGYLTLNNGSQAVGRSSFYCLEYFPSQMLRTGNNFTFSYTFEDVPFHSSYAHSQSLDRLMNPLIDQYLYYLNKTNNQSGTFTQSRLLFSQAGPTSILFKSKNWLPGPCYRQQRLSKTANDNNNSNFPWTAATKYHLNGRDSLVNPGPAMASHKDDEEKFFPQHGTLIFGKQGTKLTDADLDNVMITDEEEIRTTNPVATEQYGTVSNNLQKLNILATTGTVNTQGALPGMVWQDRDVYLQGPIWAKIPHTDGHFHPSPLMGGFGLKHPPPQIMIKNTPVPANPPTNFSSAKFASFITQYSTGQVSVEIEWELQKENSKRWNPEIQYTSNYNKSVNVDFTVDTNGVYSEPRPIGTRYLTRNL

SEQ ID NO: 12748 - protein, 735 aa, Artificial Sequence
  source: /note="Description of Artificial Sequence: Synthetic polypeptide"
MAADGYLPDWLEDTLSEGIRQWWKLKPGPPPPKPAERHKDDSRGLVLPGYKYLGPFNGLDKGEPVNEADAAALEHDKAYDRQLDSGDNPYLKYNHADAEFQERLKEDTSFGGNLGRAVFQAKKRVLEPLGLVEEPVKTAPGKKRPVEHSPVEPDSSSGTGKAGQQPARKRLNFGQTGDADSVPDPQPLGQPPAAPTSLGSTTMATGSGAPMADNNEGADGVGNSSGNWHCDSQWLGDRVITTSTRTWALPTYNNHLYKQISSQSGASNDNHYFGHSTPWGYFDFNRFHCHFSPRDWQRLINNNWGFRPKRLNFKLFNIQVKEVTQNDGTTTIANNLTSTVQVFTDSEYQLPYVLGSAHQGCLPPFPADVFMVPQYGYLTLNNGSQAVGRSSFYCLEYFPSQMLRTGNNFTFSYTFEDVPFHSSYAHSQSLDRLMNPLIDQYLYYLNKTNNQSGTFTQSRLLFSQAGPTSILFKSKNWLPGPCYRQQRLSKTANDNNNSNFPWTAATKYHLNGRDSLVNPGPAMASHKDDEEKFFPQHGTLIFGKQGTKLTDADLDNVMITDEEEIRTTNPVATEQYGTVSNNLQKLNILATTGTVNTQGALPGMVWQDRDVYLQGPIWAKIPHTDGHFHPSPLMGGFGLKHPPPQIMIKNTPVPANPPTNFSSAKFASFITQYSTGQVSVEIEWELQKENSKRWNPEIQYTSNYNKSVNVDFTVDTNGVYSEPRPIGTRYLTRNL

SEQ ID NO: 12749 - protein, 735 aa, Artificial Sequence
  source: /note="Description of Artificial Sequence: Synthetic polypeptide"
MAADGYLPDWLEDTLSEGIRQWWKLKPGPPPPKPAERHQDDSRGLVLPGYKYLGPFNGLDKGEPVNEADAAALEHDKAYDRQLDSGDNPYLKYNHADAEFQERLKEDTSFGGNLGRAVFQAKKRVLEPLGLVEEPVKTAPGKKRPVEHSPAEPDSSSGTGKAGQQPARKRLNFGQTGDADSVPDPQPLGQPPAAPTSLGSTTMATGSGAPMADNNEGADGVGNSSGNWHCDSQWLGDGVITTSTRTWALPTYNNHLYKQISSQSGASNDNHYFGYSTPWGYFDFNRFHCHFSPRDWQRLINNNWGFRPKRLNFKLFNIQVKEVTQNDGTTTIANNLTSTVQVFTDSEYQLPYVLGSAHQGCLPPFPADVFMVPQYGYLTLNNGSQAVGRSSFYCLEYFPSQMLRTGNNFTFSYTFEDVPFHSSYAHSQSLDRLMNPLIDQYLYYLNRTQSNSGTLQQSRLLFSQAGPTSMSLQAKNWLPGPCYRQQRLSKQANDNNNSNFPWTAATKYHLNGRDSLVNPGPAMASHKDDEEKFFPMHGTLIFGKQGTNANDADLEHVMITDEEEIRTTNPVATEQYGNVSNNLQNSNTGPTTENVNHQGALPGMVWQDRDVYLQGPIWAKIPHTDGHFHPSPLMGGFGLKHPPPQIMIKNTPVPANPPTNFSAAKFASFITQYSTGQVSVEIEWELQKENSKRWNPEIQYTSNYNKSVNVDFTVDTNGVYSEPRPIGTRYLTRNL

SEQ ID NO: 12750 - protein, 735 aa, Artificial Sequence
  source: /note="Description of Artificial Sequence: Synthetic polypeptide"
MAADGYLPDWLEDTLSEGIRQWWKLKPGPPPPKPAERHQDDSRGLVLPGYKYLGPFNGLDKGEPVNEADAAALEHDKAYDRQLDSGDNPYLKYNHADAEFQERLKEDTSFGGNLGRAVFQAKKRVLEPLGLVEEPVKTAPGKKRPVEHSPAEPDSSSGTGKAGQQPARKRLNFGQTGDADSVPDPQPLGQPPAAPTSLGSTTMATGSGAPMADNNEGADGVGNSSGNWHCDSQWLGDRVITTSTRTWALPTYNNHLYKQISSQSGASNDNHYFGYSTPWGYFDFNRFHCHFSPRDWQRLINNNWGFRPKRLNFKLFNIQVKEVTQNDGTTTIANNLTSTVQAFTDSEYQLPYVLGSAHQGCLPPFPADVFMVPQYGYLTLNNGSQAVGRSSFYCLEYFPSQMLRTGNNFTFSYTFEDVPFHSSYAHSQSLDRLMNPLIDQYLYYLNRTQSNSGTLQQSRLLFSQAGPTSMSLQAKNWLPGPCYRQQRLSKQANDNNNSNFPWTAATKYHLNGRDSLVNPGPAMASHKDDEEKFFPMHGTLIFGKQGTNANDADLEHVMITDEEEIRTTNPVATEQYGNVSNNLQNSNTGPTTENVNHQGALPGMVWQDRDVYLQGPIWAKIPHTDGHFHPSPLMGGFGLKHPPPQIMIKNTPVPANPPTNFSAAKFASFITQYSTGQVSVEIEWELQKENSKRWNPEIQYTSNYNKSVNVDFTVDTNGVYSEPRPIGTRYLTRNL

SEQ ID NO: 12751 - protein, 735 aa, Artificial Sequence
  source: /note="Description of Artificial Sequence: Synthetic polypeptide"
MAADGYLPDWLEDTLSEGIRQWWKLKPGPPPPKPAERHQDDSRGLVLPGYKYLGPFNGLDKGEPVNEADAAALEHDKAYDRQLDSGDNPYLKYNHADAEFQERLKEDTSFGGNLGRAVFQAKKRVLEPLGLVEEPVKTAPGKKRPVEHSPAEPDSSSGTGKAGQQPARKRLNFGQTGDADSVPDPQPLGQPPAAPTSLGSTTMATGSGAPMADNNEGADGVGNSSGNWHCDSQWLGDRVITTSTRTWALPTYNNHLYKQISSQSGASNDNHYFGYSTPWGYFDFNRFHCHFSPRDWQRLINNNWGFRPKRLNFKLFNIQVKEVTQNDGTTTIANNLTSTVQVFTDSEYQLPYVLGSAHQGCLPPFPADVFMVPQYGYLTLNNGSQAVGRSSFYCLEYFPSQMLRTGNNFTFSYTFEDVPFHSSYAHSQSLDRLMNPLIDQYLYYLNRTQSNSGTLQQSRLLFSQAGPTSMSLQAKNWLPGPCYRQQRLSKQANDNNNSNFPWTAATKYHLNGRDSLVNPGPAMASHKDDEEKFFPMHGTLIFGKQGTNANDADLEHVMITDEEEIRTTNPVATEQYGNVSNNLQNSNTGPTTENVNHQGALPGMVWQDRDVYLQGPIWAKIPHTDGHFHPSPLMGGFGLKHPPPQIMIKNTPVPANPPTNFSAAKFASFITQYSTGQVSVEIEWELQKGNSKRWNPEIQYTSNYNKSVNVDFTVDTNGVYSEPRPIGTRYLTRNL

SEQ ID NO: 12752 - protein, 735 aa, Artificial Sequence
  source: /note="Description of Artificial Sequence: Synthetic polypeptide"
MAADGYLPDWLEDTLSEGIRQWWKLKPGPPPPKPAERHQDDSRGLVLPGYKYLGPFNGLDKGEPVNEADAAALEHDKAYDRQLDSGDNPYLKYNHADAEFQERLKEDTSFGGNLGRAVFQAKKRVLEPLGLVEEPVKTAPGKKRPVEHSPAEPDSSSGTGKAGQQPARKRLNFGQTGDADSVPDPQPLGQPPAAPTSLGSTTMATGSGAPMADNNEGADGVGNSSGNWHCDSQWLGDRVITTSTRTWALPTYNNHLYKQISSQSGASNDNHYFGYSTPWGYFDFNRFHCHFSPRDWQRLINNNWGFRPKRLNFKLFNIQVKEVTQNDGTTTIANNLTSTVQVFTDSEYQLPYVLGSAHQGCLPPFPADVFMVPQYGYLTLNNGSQAVGRSSFYCLEYFPSQMLRTGNNFTFSYTFEDVPFHSSYAHSQSLDRLMNPLIDQYLYYLNRTQSNSGTLQQSRLLFSQAGPTSMSLQAKNWLPGPCYRQQRLSKQANDNNNSNFPWTAATKYHLNGRDSLVNPGPAMASHKDDEEKFFPMHGTLIFGKQGTNANDADLEHVMITDEEEIRTTNPVATEQYGNVSNNLQNSNTGPTTENVNHQGALPGMVWQDRDVYLQGPIWAKIPHTDGHFHPSPLMGGFGLKHPPPQIMIKNTPVPANPPTNFSAAKFASFITQYSTGQVSVEIEWGLQKENSKRWNPEIQYTSNYNKSVNVDFTVDTNGVYSEPRPIGTRYLTRNL

SEQ ID NO: 12753 - protein, 735 aa, Artificial Sequence
  source: /note="Description of Artificial Sequence: Synthetic polypeptide"
MAADGYLPDWLEDTLSEGIRQWWKLKPGPPPPKPAERHQDDSRGLVLPGYKYLGPFNGLDKGEPVNEADAAALEHDKAYDRQLDSGDNPYLKYNHADAEFQERLKEDTSFGGNLGRAVFQAKKRVLEPLGLVEEPVKTAPGKKRPVEHSPAEPDSSSGTGKAGQQPARKRLNFGQTGDADSVPDPQPLGQPPAAPTSLGSTTMATGSGAPMADNNEGADGVGNSSGNWHCDSQWLGDRVITTSTRTWALPTYNNHLYKQISSQSGASNDNHYFGYSTPWGYFDFNRFHCHFSPRDWQRLINNNWGFRPKRLNFKLFNIQVKEVTQNDGTTTIANNLTSTVQVFTDSEYQLPYVLGSAHQGCLPPFPADVFMVPQYGYLTLNNGSQAVGRSSFYCLEYFPSQMLRTGNNFTFSYTFEDVPFHSSYAHSQSLDRLMNPLIDQYLYYLNRTRSNSGTLQQSRLLFSQAGPTSMSLQAKNWLPGPCYRQQRLSKQANDNNNSNFPWTAATKYHLNGRDSLVNPGPAMASHKDDEEKFFPMHGTLIFGKQGTNANDADLEHVMITDEEEIRTTNPVATEQYGNVSNNLQNSNTGPTTENVNHQGALPGMVWQDRDVYLQGPIWAKIPHTDGHFHPSPLMGGFGLKHPPPQIMIKNTPVPANPPTNFSAAKFASFITQYSTGQVSVEIEWELQKENSKRWNPEIQYTSNYNKSVNVDFTVDTNGVYSEPRPIGTRYLTRNL

SEQ ID NO: 12754 - protein, 735 aa, Artificial Sequence
  source: /note="Description of Artificial Sequence: Synthetic polypeptide"
MAADGYLPDWLEDTLSEGIRQWWKLKPGPPPPKPAERHQDDSRGLVLPGYKYLGPFNGLDKGEPVNEADAAALEHDKAYDRQLDSGDNPYLKYNHADAEFQERLKEDTSFGGNLGRAVFQAKKRVLEPLGLVEEPVKTAPGKKRPVEHSPAEPDSSSGTGKAGQQPARKRLNFGQTGDADSVPDPQPLGQPPAAPTSLGSTTMATGSGAPMADNNEGADGVGNSSGNWHCDSQWLGDRVITTSTRTWALPTYNNHLYKQISSQSGASNDNHYFGYSTPWGYFDFNRFHCHFSPRDWQRLINNNWGFRPKRLNFKLFNIQVKEVTQNDGTTTIANNLTSTVQVFTDSEYQLPYVLGSAHQGCLPPFPADVFMVPQYGYLTLNNGSQAVGRSSFYCLEYFPSQMLRTGNNFTFSYTFEDVPFHSSYAHSQSLDRLMNPLIDQYLYYLNRTQSNSGTLQQSRLLFSQAGPTSMSLQAKNWLPGPCYRQQRLSKQANDNNNSNFPWTAATKYHLNGRDSLVNPGPAMASHKDDEEKFFPMHGTLIFGKQGTNANDADLEHVMITDEEEIRTTNPVATEQYGNVSNNLQNSNTGPTTENVNHQGALPGMVWQDRGVYLQGPIWAKIPHTDGHFHPSPLMGGFGLKHPPPQIMIKNTPVPANPPTNFSAAKFASFITQYSTGQVSVEIEWELQKENSKRWNPEIQYTSNYNKSVNVDFTVDTNGVYSEPRPIGTRYLTRNL

SEQ ID NO: 12755 - protein, 735 aa, Artificial Sequence
  source: /note="Description of Artificial Sequence: Synthetic polypeptide"
MAADGYLPDWLEDTLSEGIRQWWKLKPGPPPPKPAERHQDDSRGLVLPGYKYLGPFNGLDKGEPVNEADAAALEHDKAYDRQLDSGDNPYLKYNHADAEFQERLKEDTSFGGNLGRAVFQAKKRVLEPLGLVEEPVKTAPGKKRPVEHSPAEPDSSSGTGKAGQQPARKRLNFGQTGDADSVPDPQPLGQPPAAPTSLGSTTMATGSGAPMADNNEGADGVGNSSGNWHCDSQWLGDRVITTSTRTWALPTYNNHLYKQISSQSGASNDNHYFGYSTPWGYFDFNRFHCHFSPRDWQRLINNNWGFRPKRLNFKLFNIQVKEVTQNGGTTTIANNLTSTVQVFTDSEYQLPYVLGSAHQGCLPPFPADVFMVPQYGYLTLNNGSQAVGRSSFYCLEYFPSQMLRTGNNFTFSYTFEDVPFHSSYAHSQSLDRLMNPLIDQYLYYLNRTQSNSGTLQQSRLLFSQAGPTSMSLQAKNWLPGPCYRQQRLSKQANDNNNSNFPWTAATKYHLNGRDSLVNPGPAMASHKDDEEKFFPMHGTLIFGKQGTNANDADLEHVMITDEEEIRTTNPVATEQYGNVSNNLQNSNTGPTTENVNHQGALPGMVWQDRDVYLQGPIWAKIPHTDGHFHPSPLMGGFGLKHPPPQIMIKNTPVPANPPTNFSAAKFASFITQYSTGQVSVEIEWELQKENSKRWNPEIQYTSNYNKSVNVDFTVDTNGVYSEPRPIGTRYLTRNL

SEQ ID NO: 12756 - protein, 735 aa, Artificial Sequence
  source: /note="Description of Artificial Sequence: Synthetic polypeptide"
MAADGYLPDWLEDTLSEGIRQWWKLKPGPPPPKPAERHQDDSRGLVLPGYKYLGPFNGLDKGEPVNEADAAALEHDKAYDRQLDSGDNPYLKYNHADAEFQERLKEDTSFGGNLGRAVFQAKKRVLEPLGLVEEPVKTAPGKKRPVEHSPAEPDSSSGTGKAGQQPARKRLNFGQTGDADSVPDPQPLGQPPAAPTSLGSTTMATGSGAPMADNNEGADGVGNSSGNWHCDSQWLGDRVITTSTRTWALPTYNNHLYKQISSQSGASNDNHYFGYSTPWGYFDFNRFHCHFSPRDWQRLINNNWGFRPKRLNFKLFNIQVKEVTQNDGTTTIANNLTSTVQVFTDSEYQLPYVLGSAHQGCLPPFPADVFMVPQYGYLTLNNGSQAVGRSSFYCLEYFPSQMLRTGNNFTFSYTFEDVPFHSSYAHSQSLDRLMNPLIDQYLYYLNRTQSNSGTLQQSRLLFSQAGPTSMSLQAKNWLPGPCYRQQRLSKQANDNNNSNFPWTAATKYHLNGRDSLVNPGPAMASHKDDEEKFFPMHGTLIFGKQGTNANDADLEHVMITDEEEIRTTNPVATEQYGNVSNNLQNSNTGPTTENVNHQGALPGMVWQDRDVYLQGPIWAKIPHTDGHFHPSPLMGGFGLKHPPPQIMIKNTPVPANPPTNFSAAKFASFITQYSTGQVSVEIEWELRKENSKRWNPEIQYTSNYNKSVNVDFTVDTNGVYSEPRPIGTRYLTRNL

SEQ ID NO: 12757 - protein, 735 aa, Artificial Sequence
  source: /note="Description of Artificial Sequence: Synthetic polypeptide"
MAADGYLPDWLEDTLSEGIRQWWKLKPGPPPPKPAERHQDDSRGLVLPGYKYLGPFNGLDKGEPVNEADAAALEHDKAYDRQLDSGDNPYLKYNHADAEFQERLKEDTSFGGNLGRAVFQAKRRVLEPLGLVEEPVKTAPGKKRPVEHSPAEPDSSSGTGKAGQQPARKRLNFGQTGDADSVPDPQPLGQPPAAPTSLGSTTMATGSGAPMADNNEGADGVGNSSGNWHCDSQWLGDRVITTSTRTWALPTYNNHLYKQISSQSGASNDNHYFGYSTPWGYFDFNRFHCHFSPRDWQRLINNNWGFRPKRLNFKLFNIQVKEVTQNDGTTTIANNLTSTVQVFTDSEYQLPYVLGSAHQGCLPPFPADVFMVPQYGYLTLNNGSQAVGRSSFYCLEYFPSQMLRTGNNFTFSYTFEDVPFHSSYAHSQSLDRLMNPLIDQYLYYLNRTQSNSGTLQQSRLLFSQAGPTSMSLQAKNWLPGPCYRQQRLSKQANDNNNSNFPWTAATKYHLNGRDSLVNPGPAMASHKDDEEKFFPMHGTLIFGKQGTNANDADLEHVMITDEEEIRTTNPVATEQYGNVSNNLQNSNTGPTTENVNHQGALPGMVWQDRDVYLQGPIWAKIPHTDGHFHPSPLMGGFGLKHPPPQIMIKNTPVPANPPTNFSAAKFASFITQYSTGQVSVEIEWELQKENSKRWNPEIQYTSNYNKSVNVDFTVDTNGVYSEPRPIGTRYLTRNL

SEQ ID NO: 12758 - protein, 735 aa, Artificial Sequence
  source: /note="Description of Artificial Sequence: Synthetic polypeptide"
MAADGYLPDWLEDTLSEGIRQWWKLKPGPPPPKPAERHQDDSRGLVLPGYKYLGPFNGLDKGEPVNEADAAALEHDKAYDRQLDSGDNPYLKYNHADAELQERLKEDTSFGGNLGRAVFQAKKRVLEPLGLVEEPVKTAPGKKRPVEHSPAEPDSSSGTGKAGQQPARKRLNFGQTGDADSVPDPQPLGQPPAAPTSLGSTTMATGSGAPMADNNEGADGVGNSSGNWHCDSQWLGDRVITTSTRTWALPTYNNHLYKQISSQSGASNDNHYFGYSTPWGYFDFNRFHCHFSPRDWQRLINNNWGFRPKRLNFKLFNIQVKEVTQNDGTTTIANNLTSTVQVFTDSEYQLPYVLGSAHQGCLPPFPADVFMVPQYGYLTLNNGSQAVGRSSFYCLEYFPSQMLRTGNNFTFSYTFEDVPFHSSYAHSQSLDRLMNPLIDQYLYYLNRTQSNSGTLQQSRLLFSQAGPTSMSLQAKNWLPGPCYRQQRLSKQANDNNNSNFPWTAATKYHLNGRDSLVNPGPAMASHKDDEEKFFPMHGTLIFGKQGTNANDADLEHVMITDEEEIRTTNPVATEQYGNVSNNLQNSNTGPTTENVNHQGALPGMVWQDRDVYLQGPIWAKIPHTDGHFHPSPLMGGFGLKHPPPQIMIKNTPVPANPPTNFSAAKFASFITQYSTGQVSVEIEWELQKENSKRWNPEIQYTSNYNKSVNVDFTVDTNGVYSEPRPIGTRYLTRNL

SEQ ID NO: 12759 - protein, 735 aa, Artificial Sequence
  source: /note="Description of Artificial Sequence: Synthetic polypeptide"
MAADGYLPDWLEDTLSEGIRQWWKLKPGPPPPKPAERHQDDSRGLVLPGYKYLGPFNGLDKGEPVNEADAAALEHDKAYDRQLDSGDNPYLKYNHADAEFQERLKEDTSFGGNLGRAVFQAKKRVLEPLGLVEEPVKTAPGKKRPVEHSPAEPDSSSGTGKAGQQPARKRLNFGQTGDADSVPDPQPLGQPPAAPTSLGSTTMATGSGAPMADNNEGADGVGNSSGNWHCDSQWLGGRVITTSTRTWALPTYNNHLYKQISSQSGASNDNHYFGYSTPWGYFDFNRFHCHFSPRDWQRLINNNWGFRPKRLNFKLFNIQVKEVTQNDGTTTIANNLTSTVQVFTDSEYQLPYVLGSAHQGCLPPFPADVFMVPQYGYLTLNNGSQAVGRSSFYCLEYFPSQMLRTGNNFTFSYTFEDVPFHSSYAHSQSLDRLMNPLIDQYLYYLNRTQSNSGTLQQSRLLFSQAGPTSMSLQAKNWLPGPCYRQQRLSKQANDNNNSNFPWTAATKYHLNGRDSLVNPGPAMASHKDDEEKFFPMHGTLIFGKQGTNANDADLEHVMITDEEEIRTTNPVATEQYGNVSNNLQNSNTGPTTENVNHQGALPGMVWQDRDVYLQGPIWAKIPHTDGHFHPSPLMGGFGLKHPPPQIMIKNTPVPANPPTNFSAAKFASFITQYSTGQVSVEIEWELQKENSKRWNPEIQYTSNYNKSVNVDFTVDTNGVYSEPRPIGTRYLTRNL

SEQ ID NO: 12760 - protein, 735 aa, Artificial Sequence
  source: /note="Description of Artificial Sequence: Synthetic polypeptide"
MAADGYLPDWLEDTLSEGIRQWWKLKPGPPPPKPAERHQDDSRGLVLPGYKYLGPFNGLDKGEPVNEADAAALEHDKAYDRQLDSGDNPYLKYNHADAEFQERLKEDTSFGGNLGRAVFQAKKRVLEPLGLVEEPVKTAPGKKRPVEHSPAEPDSSSGTGKAGQQPARKRLNFGQTGDADSVPDPQPLGQPPAAPTSLGSTTMATGSGAPMADNNEGADGVGNSSGNWHCDSQWLGDRVITTSTRTWALPTYNNHLYKQISSQSGASNDNHYFGYSTPWGYFDFNRFHCHFSPRDWQRLINNNWGFRPKRLNFKLFNIQVKEVTQNDGTTTIANNLTSTVQVFTDSEYQLPYVLGSAHQGCLPPLPADVFMVPQYGYLTLNNGSQAVGRSSFYCLEYFPSQMLRTGNNFTFSYTFEDVPFHSSYAHSQSLDRLMNPLIDQYLYYLNRTQSNSGTLQQSRLLFSQAGPTSMSLQAKNWLPGPCYRQQRLSKQANDNNNSNFPWTAATKYHLNGRDSLVNPGPAMASHKDDEEKFFPMHGTLIFGKQGTNANDADLEHVMITDEEEIRTTNPVATEQYGNVSNNLQNSNTGPTTENVNHQGALPGMVWQDRDVYLQGPIWAKIPHTDGHFHPSPLMGGFGLKHPPPQIMIKNTPVPANPPTNFSAAKFASFITQYSTGQVSVEIEWELQKENSKRWNPEIQYTSNYNKSVNVDFTVDTNGVYSEPRPIGTRYLTRNL

SEQ ID NO: 12761 - protein, 735 aa, Artificial Sequence
  source: /note="Description of Artificial Sequence: Synthetic polypeptide"
MAADGYLPDWLEDTLSEGIRQWWKLKPGPPPPKPAERHQDDSRGLVLPGYKYLGPFNGLDKGEPVNEADAAALEHDKAYDRQLDSGDNPYLKYNHADAEFQERLKEDTSFGGNLGRAVFQAKKRVLEPLGLVEEPVKTAPGKKRPVEHSPAEPDSSSGTGKAGQQPARKRLNFGQTGDADSVPDPQPLGQPPAAPTSLGSTAMATGSGAPMADNNEGADGVGNSSGNWHCDSQWLGDRVITTSTRTWALPTYNNHLYKQISSQSGASNDNHYFGYSTPWGYFDFNRFHCHFSPRDWQRLINNNWGFRPKRLNFKLFNIQVKEVTQNDGTTTIANNLTSTVQVFTDSEYQLPYVLGSAHQGCLPPFPADVFMVPQYGYLTLNNGSQAVGRSSFYCLEYFPSQMLRTGNNFTFSYTFEDVPFHSSYAHSQSLDRLMNPLIDQYLYYLNRTQSNSGTLQQSRLLFSQAGPTSMSLQAKNWLPGPCYRQQRLSKQANDNNNSNFPWTAATKYHLNGRDSLVNPGPAMASHKDDEEKFFPMHGTLIFGKQGTNANDADLEHVMITDEEEIRTTNPVATEQYGNVSNNLQNSNTGPTTENVNHQGALPGMVWQDRDVYLQGPIWAKIPHTDGHFHPSPLMGGFGLKHPPPQIMIKNTPVPANPPTNFSAAKFASFITQYSTGQVSVEIEWELQKENSKRWNPEIQYTSNYNKSVNVDFTVDTNGVYSEPRPIGTRYLTRNL

SEQ ID NO: 12762 - protein, 735 aa, Artificial Sequence
  source: /note="Description of Artificial Sequence: Synthetic polypeptide"
MAADGYLPDWLEDTLSEGIRQWWKLKPGPPPPKPAERHQDDSRGLVLPGYKYLGPFNGLDKGEPVNEADAAALEHDKAYDRQLDSGDNPYLKYNHADAEFQERLKEDTSFGGNLGRAVFQAKKRVLEPLGLVEEPVKTAPGKKRPVEHSPAEPDSSSGTGKAGQQPARKRLNFGQTGDADSVPDPQPLGQPPAAPTSLGSTTMATGSGAPMADNNEGADGVGNSSGNWHCDSQWLGDRVITTSTRTWALPTYNNHLYKQISSQSGASNDNHYFGYSTPWGYFDFNRFHCHFSPRDWQRLINNNWGFRPKRLNFKLFNIQVKEVTQNDGTTTIANNLTSTVQVFTDSEYQLPYVLGSAHQGCLPPFPADVFMVPQYGYLTLNNGSQAVGRSSFYCLEYFPSQMLRTGNNFTFSYTFEDVPFHSSYAHSQSLDRLMNPLIDQYLYYLNRTQSNSGTLQQSRLLFSQAGPTSMSLQAKNWLPGPCYRQQRLSRQANDNNNSNFPWTAATKYHLNGRDSLVNPGPAMASHKDDEEKFFPMHGTLIFGKQGTNANDADLEHVMITDEEEIRTTNPVATEQYGNVSNNLQNSNTGPTTENVNHQGALPGMVWQDRDVYLQGPIWAKIPHTDGHFHPSPLMGGFGLKHPPPQIMIKNTPVPANPPTNFSAAKFASFITQYSTGQVSVEIEWELQKENSKRWNPEIQYTSNYNKSVNVDFTVDTNGVYSEPRPIGTRYLTRNL

SEQ ID NO: 12763 - protein, 735 aa, Artificial Sequence
  source: /note="Description of Artificial Sequence: Synthetic polypeptide"
MAADGYLPDWLEDTLSEGIRQWWKLKPGPPPPKPAERHQDDSRGLVLPGYKYLGPFNGLDKGEPVNEADAAALEHDKAYDRQLGSGDNPYLKYNHADAEFQERLKEDTSFGGNLGRAVFQAKKRVLEPLGLVEEPVKTAPGKKRPVEHSPAEPDSSSGTGKAGQQPARKRLNFGQTGDADSVPDPQPLGQPPAAPTSLGSTTMATGSGAPMADNNEGADGVGNSSGNWHCDSQWLGDRVITTSTRTWALPTYNNHLYKQISSQSGASNDNHYFGYSTPWGYFDFNRFHCHFSPRDWQRLINNNWGFRPKRLNFKLFNIQVKEVTQNDGTTTIANNLTSTVQVFTDSEYQLPYVLGSAHQGCLPPFPADVFMVPQYGYLTLNNGSQAVGRSSFYCLEYFPSQMLRTGNNFTFSYTFEDVPFHSSYAHSQSLDRLMNPLIDQYLYYLNRTQSNSGTLQQSRLLFSQAGPTSMSLQAKNWLPGPCYRQQRLSKQANDNNNSNFPWTAATKYHLNGRDSLVNPGPAMASHKDDEEKFFPMHGTLIFGKQGTNANDADLEHVMITDEEEIRTTNPVATEQYGNVSNNLQNSNTGPTTENVNHQGALPGMVWQDRDVYLQGPIWAKIPHTDGHFHPSPLMGGFGLKHPPPQIMIKNTPVPANPPTNFSAAKFASFITQYSTGQVSVEIEWELQKENSKRWNPEIQYTSNYNKSVNVDFTVDTNGVYSEPRPIGTRYLTRNL

SEQ ID NO: 12764 - protein, 735 aa, Artificial Sequence
  source: /note="Description of Artificial Sequence: Synthetic polypeptide"
MAADGYLPDWLEDTLSEGIRQWWKLKPGPPPPKPAERHQDDSRGLVLPGYKYLGPFNGLDKGEPVNEADAAALEHDKAYDRQLDSGDNPYLKYNHADAEFQERLKEDTSFGGNLGRAVFQAKKRVLEPLGLVEEPVKTAPGKKRPVEHSPAEPDSSSGTGKAGQQPARKRLNFGQTGDADSVPDPQPLGQPPAAPTSLGSTTMATGSGAPMADNNEGADGVGNSSGNWHCDSQWLGDRVITTSTRTWALPTYNNHLYKQISSQSGASNDNHYFGYSTPWGYFDFNRFHCHFSPRDWQRLINNNWGFRPKRLNFKLFNIQVKEVTQNDGTTTIANNLTSTVQVFTDSEYQLPYVLGSAHQGCLPPFPADVFMVPQYGYLTLNNGSQAVGRSSFYCLEYFPSQMLRTGNNFTFSYTFEDVPFHSSYAHSQSLDRLMNPLIDQYLHYLNRTQSNSGTLQQSRLLFSQAGPTSMSLQAKNWLPGPCYRQQRLSKQANDNNNSNFPWTAATKYHLNGRDSLVNPGPAMASHKDDEEKFFPMHGTLIFGKQGTNANDADLEHVMITDEEEIRTTNPVATEQYGNVSNNLQNSNTGPTTENVNHQGALPGMVWQDRDVYLQGPIWAKIPHTDGHFHPSPLMGGFGLKHPPPQIMIKNTPVPANPPTNFSAAKFASFITQYSTGQVSVEIEWELQKENSKRWNPEIQYTSNYNKSVNVDFTVDTNGVYSEPRPIGTRYLTRNL

SEQ ID NO: 12765 - protein, 735 aa, Artificial Sequence
  source: /note="Description of Artificial Sequence: Synthetic polypeptide"
MAADGYLPDWLEDTLSEGIRQWWKLKPGPPPPKPAERHQDDSRGLVLPGYKYLGPFNGLDKGEPVNEADAAALEHDKAYDRQLDSGDNPYLKYNHADAEFQERLKEDTSFGGNLGRAVFQAKKRVLEPLGLVEEPVKTAPGKKRPVEHPPAEPDSSSGTGKAGQQPARKRLNFGQTGDADSVPDPQPLGQPPAAPTSLGSTTMATGSGAPMADNNEGADGVGNSSGNWHCDSQWLGDRVITTSTRTWALPTYNNHLYKQISSQSGASNDNHYFGYSTPWGYFDFNRFHCHFSPRDWQRLINNNWGFRPKRLNFKLFNIQVKEVTQNDGTTTIANNLTSTVQVFTDSEYQLPYVLGSAHQGCLPPFPADVFMVPQYGYLTLNNGSQAVGRSSFYCLEYFPSQMLRTGNNFTFSYTFEDVPFHSSYAHSQSLDRLMNPLIDQYLYYLNRTQSNSGTLQQSRLLFSQAGPTSMSLQAKNWLPGPCYRQQRLSKQANDNNNSNFPWTAATKYHLNGRDSLVNPGPAMASHKDDEEKFFPMHGTLIFGKQGTNANDADLEHVMITDEEEIRTTNPVATEQYGNVSNNLQNSNTGPTTENVNHQGALPGMVWQDRDVYLQGPIWAKIPHTDGHFHPSPLMGGFGLKHPPPQIMIKNTPVPANPPTNFSAAKFASFITQYSTGQVSVEIEWELQKENSKRWNPEIQYTSNYNKSVNVDFTVDTNGVYSEPRPIGTRYLTRNL

SEQ ID NO: 12766 - protein, 735 aa, Artificial Sequence
  source: /note="Description of Artificial Sequence: Synthetic polypeptide"
MAADGYLPDWLEDTLSEGIRQWWKLKPGPPPPKPAERHQDDSRGLVLPGYKYLGPFNGLDKGEPVNEADAAALEHDKAYDRQLDSGDNPYLKYNHADAEFQERLKEDTSFGGNLGRAVFQAKKRVLEPLGLVEEPVKTAPGKKRPVEHSPAEPDSSSGTGKAGQQPARKRLNFGQTGDADSVPDPQPLGQPPAAPTSLGSTTMATGSGAPMADNNEGADGVGNSSGNWHCDSQWLGDRVITTSTRTWALPTYNNHLYKQISSQSGASNDNHYFGYSTPWGYFDFNRFHCHFSPRDWQRLINNNWGFRPKRLNFKLFNIQVKEVTQNDGTTTIANNLTSTVQVFTDSEYQLPYVLGSAHQGCLPPFPADVFMVPQYGYLTLNNGSQAVGRSSFYCLEYFPSQMLRTGNNFTFSYTFEDVPFHSSYAHSQSLDRLMNPLIDQYLYYLNRTQSNSGTLQQSRLLFSQAGPTSMSLQAKNWLPGPCYRQQRLSKQANDNNNSNFPWTAATKYHLNGRDSLVNPGPAMASHKDDEEKFFPMHGTLIFGKQGTNANDADLEHVMITDEEEIRTTNPVATEQYGNVSNNLQNSNTGPTTENVNHQGALPGMVWQDRDVYLQGPIWAKIPHTDGHFHPSPLMGGFGLKHPPPQIMIKNTPVPANPPTNFSAAKFASFITQYSTGQVSVEIEWELQKENSKRWNPEIQYTSNYNKSVNVDFTADTNGVYSEPRPIGTRYLTRNL

SEQ ID NO: 12767 - protein, 735 aa, Artificial Sequence
  source: /note="Description of Artificial Sequence: Synthetic polypeptide"
MAADGYLPDWLEDTLSEGIRQWWKLKPGPPPPKPAERHQDDSRGLVLPGYKYLGPFNGLDKGEPVNEADAAALEHDKAYDRQLDSGDNPYLKYNHADAEFQERLKEDTSFGGNLGRAVFQAKKRVLEPLGLVEEPVKTAPGKKRPVEHSPAEPDSSSGTGKAGQQPARKRLNFGQTGDADSVPDPQPLGQPPAAPTSLGSTTMATGSGAPMADNNEGADGVGNSSGNWHCDSQWLGDRVITTSTRTWALPTYNNHLYKQISSQSGASNDNHYFGYSTPWGYFDFNRFHCHFSPRDWQRLINNNWGFRPKRLNFKLFNIQVKEVTQNDGTTTIANNLTSTVQVFTDSEYQLPYVLGSAHQGCLPPFPADVFMVPQYGYLTLNNGSQAVGRSSFYCLEYFPSQMLRTGNNFTFSYTFEDVPFHSSYAHSQSLDRLMNPLIDQYLYYLNRTQSNSGTLRQSRLLFSQAGPTSMSLQAKNWLPGPCYRQQRLSKQANDNNNSNFPWTAATKYHLNGRDSLVNPGPAMASHKDDEEKFFPMHGTLIFGKQGTNANDADLEHVMITDEEEIRTTNPVATEQYGNVSNNLQNSNTGPTTENVNHQGALPGMVWQDRDVYLQGPIWAKIPHTDGHFHPSPLMGGFGLKHPPPQIMIKNTPVPANPPTNFSAAKFASFITQYSTGQVSVEIEWELQKENSKRWNPEIQYTSNYNKSVNVDFTVDTNGVYSEPRPIGTRYLTRNL

SEQ ID NO: 12768 - protein, 735 aa, Artificial Sequence
  source: /note="Description of Artificial Sequence: Synthetic polypeptide"
MAADGYLPDWLEDTLSEGIRQWWKLKPGPPPPKPAERHQDDSRGLVLPGYKYLGPFNGLDKGEPVNEADAAALEHDKAYDRQLDSGDNPYLKYNHADAEFQERLKEDTSFGGNLGRAVFQAKKRVLEPLGLVEEPVKTAPGKKRPVEHSPAEPDSSSGTGKAGQQPARKRLNFGQTGDADSVPDPQPLGQPPAAPTSLGSTTMATGSGAPMADNNEGADGVGNSSGNWHCDSQWLGDRVITTSTRTWALPTYNNHLYKQISSQSGASNDNHYFGYSTPWGYFDFNRFHCHFSPRDWQRLINNNWGFRPKRLNFKLFNIQVKEVTQNDGTTTIANNLTSTVQVFTDSEYQLPYVLGSAHQGCLPPFPADVFMVPQYGYLTLNNGSQAVGRSSFYCLEYFPSQMLRTGNNFTFSYTFEDVPFHSSYAHSQSLDRLMNPLIDQYLYYLNRTQSNSGTLQQSRLLFSQAGPTSMSLQAKNWLPGPCYRQQRLSKQANDNNNSNFPWTAATKYHLNGRDSLVNPGPAMASHKDDEEKFFPMHGTLIFGKQGTNANDADLEHVMITDEEEIRTTNPVATEQYGNVSNNLQNSNTGPTTENVNHQGALPGMVWQDRDVYLQGPIWAKIPHTDGHFHPSPLMGGFGLKHPPPQIMIKNTPVPANPPTNFSAAKFASFITQYSTGRVSVEIEWELQKENSKRWNPEIQYTSNYNKSVNVDFTVDTNGVYSEPRPIGTRYLTRNL

SEQ ID NO: 12769 - protein, 735 aa, Artificial Sequence
  source: /note="Description of Artificial Sequence: Synthetic polypeptide"
MAADGYLPDWLEDTLSEGIRQWWKLKPGPPPPKPAERHQDDSRGLVLPGYKYLGPFNGLDKGEPVNEADAAALEHDKAYDRQLDSGDNPYLKYNHADAEFQERLKEDTSFGGNLGRAVFRAKKRVLEPLGLVEEPVKTAPGKKRPVEHSPAEPDSSSGTGKAGQQPARKRLNFGQTGDADSVPDPQPLGQPPAAPTSLGSTTMATGSGAPMADNNEGADGVGNSSGNWHCDSQWLGDRVITTSTRTWALPTYNNHLYKQISSQSGASNDNHYFGYSTPWGYFDFNRFHCHFSPRDWQRLINNNWGFRPKRLNFKLFNIQVKEVTQNDGTTTIANNLTSTVQVFTDSEYQLPYVLGSAHQGCLPPFPADVFMVPQYGYLTLNNGSQAVGRSSFYCLEYFPSQMLRTGNNFTFSYTFEDVPFHSSYAHSQSLDRLMNPLIDQYLYYLNRTQSNSGTLQQSRLLFSQAGPTSMSLQAKNWLPGPCYRQQRLSKQANDNNNSNFPWTAATKYHLNGRDSLVNPGPAMASHKDDEEKFFPMHGTLIFGKQGTNANDADLEHVMITDEEEIRTTNPVATEQYGNVSNNLQNSNTGPTTENVNHQGALPGMVWQDRDVYLQGPIWAKIPHTDGHFHPSPLMGGFGLKHPPPQIMIKNTPVPANPPTNFSAAKFASFITQYSTGQVSVEIEWELQKENSKRWNPEIQYTSNYNKSVNVDFTVDTNGVYSEPRPIGTRYLTRNL

SEQ ID NO: 12770 - protein, 735 aa, Artificial Sequence
  source: /note="Description of Artificial Sequence: Synthetic polypeptide"
MAADGYLPDWLEDTLSEGIRQWWKPKPGPPPPKPAERHQDDSRGLVLPGYKYLGPFNGLDKGEPVNEADAAALEHDKAYDRQLDSGDNPYLKYNHADAEFQERLKEDTSFGGNLGRAVFQAKKRVLEPLGLVEEPVKTAPGKKRPVEHSPAEPDSSSGTGKAGQQPARKRLNFGQTGDADSVPDPQPLGQPPAAPTSLGSTTMATGSGAPMADNNEGADGVGNSSGNWHCDSQWLGDRVITTSTRTWALPTYNNHLYKQISSQSGASNDNHYFGYSTPWGYFDFNRFHCHFSPRDWQRLINNNWGFRPKRLNFKLFNIQVKEVTQNDGTTTIANNLTSTVQVFTDSEYQLPYVLGSAHQGCLPPFPADVFMVPQYGYLTLNNGSQAVGRSSFYCLEYFPSQMLRTGNNFTFSYTFEDVPFHSSYAHSQSLDRLMNPLIDQYLYYLNRTQSNSGTLQQSRLLFSQAGPTSMSLQAKNWLPGPCYRQQRLSKQANDNNNSNFPWTAATKYHLNGRDSLVNPGPAMASHKDDEEKFFPMHGTLIFGKQGTNANDADLEHVMITDEEEIRTTNPVATEQYGNVSNNLQNSNTGPTTENVNHQGALPGMVWQDRDVYLQGPIWAKIPHTDGHFHPSPLMGGFGLKHPPPQIMIKNTPVPANPPTNFSAAKFASFITQYSTGQVSVEIEWELQKENSKRWNPEIQYTSNYNKSVNVDFTVDTNGVYSEPRPIGTRYLTRNL

SEQ ID NO: 12771 - protein, 735 aa, Artificial Sequence
  source: /note="Description of Artificial Sequence: Synthetic polypeptide"
MAADGYLPDWLEDTLSEGIRQWWKLKPGPPPPKPAERHQDDSRGLVLPGYKYLGPFNGLDKGEPVNEADAAALEHDKAYDRQLDSGDNPYLKYNHADAEFQERLKEDTSFGGNLGRAVFQAKKRVLEPLGLVEEPVKTAPGKKRPVEHSPAEPDSSSGTGKAGQQPARKRLNFGQTGDADSVPDPQPLGQPPAAPTSLGSTTMATGSGAPMADNNEGADGVGNSSGNWHCDSQWLGDRVITTSTRTWALPTYNNHLYKQISSQSGASNDNHYFGYSTPWGYFDFNRFHCHFSPRDWQRLINNNWGFRPKRLNFKLFNIQVKEVTQNDGTTTIANNLTSTVQVFTDSEYQLPYVLGSAHQGCLPPFPADVFMVPQYGYLTLNNGSQAVGRSSFYCLEYFPSQMLRTGNNFTFSYTFEDVPFHSSYAHSQSLDRLMNPLIDQYLYYLNRTQSNSGTLQQSRLLFSQAGPTSMSLQAKNWLPGPCYRQQRLSKQANDNNNSNFPWTAATKYHLNGRDSLVNPGPAMASHKDDEEKFFPMHGTLIFGKQGTNANDADLEHVMITDEEEIRTTNPVATEQYGNVSNNLQNSNTGPTTENANHQGALPGMVWQDRDVYLQGPIWAKIPHTDGHFHPSPLMGGFGLKHPPPQIMIKNTPVPANPPTNFSAAKFASFITQYSTGQVSVEIEWELQKENSKRWNPEIQYTSNYNKSVNVDFTVDTNGVYSEPRPIGTRYLTRNL

SEQ ID NO: 12772 - protein, 735 aa, Artificial Sequence
  source: /note="Description of Artificial Sequence: Synthetic polypeptide"
MAADGYLPDWLEDTPSEGIRQWWKLKPGPPPPKPAERHQDDSRGLVLPGYKYLGPFNGLDKGEPVNEADAAALEHDKAYDRQLDSGDNPYLKYNHADAEFQERLKEDTSFGGNLGRAVFQAKKRVLEPLGLVEEPVKTAPGKKRPVEHSPAEPDSSSGTGKAGQQPARKRLNFGQTGDADSVPDPQPLGQPPAAPTSLGSTTMATGSGAPMADNNEGADGVGNSSGNWHCDSQWLGDRVITTSTRTWALPTYNNHLYKQISSQSGASNDNHYFGYSTPWGYFDFNRFHCHFSPRDWQRLINNNWGFRPKRLNFKLFNIQVKEVTQNDGTTTIANNLTSTVQVFTDSEYQLPYVLGSAHQGCLPPFPADVFMVPQYGYLTLNNGSQAVGRSSFYCLEYFPSQMLRTGNNFTFSYTFEDVPFHSSYAHSQSLDRLMNPLIDQYLYYLNRTQSNSGTLQQSRLLFSQAGPTSMSLQAKNWLPGPCYRQQRLSKQANDNNNSNFPWTAATKYHLNGRDSLVNPGPAMASHKDDEEKFFPMHGTLIFGKQGTNANDADLEHVMITDEEEIRTTNPVATEQYGNVSNNLQNSNTGPTTENVNHQGALPGMVWQDRDVYLQGPIWAKIPHTDGHFHPSPLMGGFGLKHPPPQIMIKNTPVPANPPTNFSAAKFASFITQYSTGQVSVEIEWELQKENSKRWNPEIQYTSNYNKSVNVDFTVDTNGVYSEPRPIGTRYLTRNL

SEQ ID NO: 12773 - protein, 735 aa, Artificial Sequence
  source: /note="Description of Artificial Sequence: Synthetic polypeptide"
MAADGYLPDWLEDTLSEGIRQWWKLKPGPPPPKPAERHQDDSRGLVLPGYKYLGPFNGLDKGEPVNEADAAALEHDKAYDRQLDSGDNPYLKYNHADAEFQERLKEDTSFGGNLGRAVFQAKKRVLEPLGLVEEPVKTAPGKKRPVEHSPAEPDSSSGTGKAGQQPARKRLNFGQTGDADSVPDPQPLGQPPAAPTSLGSTTMATGSGAPMADNNEGADGVGNSSGNWHCDSQWLGDRVITTSTRTWALPTYNNHLYKQISSQSGASNDNHYFGYSTPWGYFDFNRFHCHFSPRDWQRLINNNWGFRPKRLNFRLFNIQVKEVTQNDGTTTIANNLTSTVQVFTDSEYQLPYVLGSAHQGCLPPFPADVFMVPQYGYLTLNNGSQAVGRSSFYCLEYFPSQMLRTGNNFTFSYTFEDVPFHSSYAHSQSLDRLMNPLIDQYLYYLNRTQSNSGTLQQSRLLFSQAGPTSMSLQAKNWLPGPCYRQQRLSKQANDNNNSNFPWTAATKYHLNGRDSLVNPGPAMASHKDDEEKFFPMHGTLIFGKQGTNANDADLEHVMITDEEEIRTTNPVATEQYGNVSNNLQNSNTGPTTENVNHQGALPGMVWQDRDVYLQGPIWAKIPHTDGHFHPSPLMGGFGLKHPPPQIMIKNTPVPANPPTNFSAAKFASFITQYSTGQVSVEIEWELQKENSKRWNPEIQYTSNYNKSVNVDFTVDTNGVYSEPRPIGTRYLTRNL

SEQ ID NO: 12774 - protein, 735 aa, Artificial Sequence
  source: /note="Description of Artificial Sequence: Synthetic polypeptide"
MAADGYLPDWLEDTLSEGIRQWWKLKPGPPPPKPAERHQDDSRGLVLPGYKYLGPFNGLDKGEPVNEADAAALEHDKAYDRQLDSGDNPYLKYNHADAEFQERLKEDTSFGGNLGRAVFQAKKRVLEPLGLVEEPVKTAPGKKRPVEHSPAEPDSSSGTGKAGQQPARKRLNFGQAGDADSVPDPQPLGQPPAAPTSLGSTTMATGSGAPMADNNEGADGVGNSSGNWHCDSQWLGDRVITTSTRTWALPTYNNHLYKQISSQSGASNDNHYFGYSTPWGYFDFNRFHCHFSPRDWQRLINNNWGFRPKRLNFKLFNIQVKEVTQNDGTTTIANNLTSTVQVFTDSEYQLPYVLGSAHQGCLPPFPADVFMVPQYGYLTLNNGSQAVGRSSFYCLEYFPSQMLRTGNNFTFSYTFEDVPFHSSYAHSQSLDRLMNPLIDQYLYYLNRTQSNSGTLQQSRLLFSQAGPTSMSLQAKNWLPGPCYRQQRLSKQANDNNNSNFPWTAATKYHLNGRDSLVNPGPAMASHKDDEEKFFPMHGTLIFGKQGTNANDADLEHVMITDEEEIRTTNPVATEQYGNVSNNLQNSNTGPTTENVNHQGALPGMVWQDRDVYLQGPIWAKIPHTDGHFHPSPLMGGFGLKHPPPQIMIKNTPVPANPPTNFSAAKFASFITQYSTGQVSVEIEWELQKENSKRWNPEIQYTSNYNKSVNVDFTVDTNGVYSEPRPIGTRYLTRNL

SEQ ID NO: 12775 - protein, 735 aa, Artificial Sequence
  source: /note="Description of Artificial Sequence: Synthetic polypeptide"
MAADGYLPDWLEDTLSEGIRQWWKLKPGPPPPKPAERHQDDSRGLVLPGYKYLGPFNGLDKGEPVNEADAAALEHDKAYDRQLDSGDNPYLKYNHADAEFQERLKEDTSFGGNLGRAVFQAKKRVLEPLGLVEEPVKTAPGKKRPVEHSPAEPDSSSGTGKAGQQPARKRLNFGQTGDADSVPDPQPLGQPPAAPTSLGSTTVATGSGAPMADNNEGADGVGNSSGNWHCDSQWLGDRVITTSTRTWALPTYNNHLYKQISSQSGASNDNHYFGYSTPWGYFDFNRFHCHFSPRDWQRLINNNWGFRPKRLNFKLFNIQVKEVTQNDGTTTIANNLTSTVQVFTDSEYQLPYVLGSAHQGCLPPFPADVFMVPQYGYLTLNNGSQAVGRSSFYCLEYFPSQMLRTGNNFTFSYTFEDVPFHSSYAHSQSLDRLMNPLIDQYLYYLNRTQSNSGTLQQSRLLFSQAGPTSMSLQAKNWLPGPCYRQQRLSKQANDNNNSNFPWTAATKYHLNGRDSLVNPGPAMASHKDDEEKFFPMHGTLIFGKQGTNANDADLEHVMITDEEEIRTTNPVATEQYGNVSNNLQNSNTGPTTENVNHQGALPGMVWQDRDVYLQGPIWAKIPHTDGHFHPSPLMGGFGLKHPPPQIMIKNTPVPANPPTNFSAAKFASFITQYSTGQVSVEIEWELQKENSKRWNPEIQYTSNYNKSVNVDFTVDTNGVYSEPRPIGTRYLTRNL

SEQ ID NO: 12776 - protein, 735 aa, Artificial Sequence
  source: /note="Description of Artificial Sequence: Synthetic polypeptide"
MAADGYLPDWLEDTLSEGIRQWWKLKPGPPPPKPAERHQDDSRGLVLPGYKYLGPFNGLDKGEPVNEADAAALEHDKAYDRQLDSGDNPYLKYNHADAEFQERLKEDTSFGGNLGRAVFQAKKRVLEPLGLVEEPVKTAPGKKRPVEHSPAEPDSSSGTGKAGQQPARKRLNFGQTGDADSVPDPQPLGQPPAAPTSLGSTTMATGSGAPMADNNEGADGVGNSSGNWHCDSQWLGDRVITTSTRTWALPTYNNHLYKQISSQSGASNDNHYFGYSTPWGYFDFNRFHCHFSPRDWQRLINNNWGFRPKRLNFKLFNIQVKEVTQNDGTTTIANNLTSTVQVFTDSEYQLPYVLGSAHQGCLPPFPADVFMVPQYGYLTLNNGSQAVGRSSFYCLEYFPSQMLRTGNNFTFSYTFEDVPFHSSYAHSQSLDRLMNPLIDQYLYYLNRTQSNSGTLQQSRLLFSQAGPTSMSLQAKNWLPGPCYRQQRLSKQANDNNNSNFPWTAATKYHLNGRDSLVNPGPAMASHKGDEEKFFPMHGTLIFGKQGTNANDADLEHVMITDEEEIRTTNPVATEQYGNVSNNLQNSNTGPTTENVNHQGALPGMVWQDRDVYLQGPIWAKIPHTDGHFHPSPLMGGFGLKHPPPQIMIKNTPVPANPPTNFSAAKFASFITQYSTGQVSVEIEWELQKENSKRWNPEIQYTSNYNKSVNVDFTVDTNGVYSEPRPIGTRYLTRNL

SEQ ID NO: 12777 - protein, 735 aa, Artificial Sequence
  source: /note="Description of Artificial Sequence: Synthetic polypeptide"
MAADGYLPDWLEDTLSEGIRQWWKLKPGPPPPKPAERHQDDSRGLVLPGYKYLGPFNGLDKGEPVNEADAAALEHDKAYDRQLDSGDNPYLKYNHADAEFQERLKEDTSFGGNLGRAVFQAKKRVLEPLGLVEEPVKTAPGKKRPVEHSPAEPDSSSGTGKAGQQPARKGLNFGQTGDADSVPDPQPLGQPPAAPTSLGSTTMATGSGAPMADNNEGADGVGNSSGNWHCDSQWLGDRVITTSTRTWALPTYNNHLYKQISSQSGASNDNHYFGYSTPWGYFDFNRFHCHFSPRDWQRLINNNWGFRPKRLNFKLFNIQVKEVTQNDGTTTIANNLTSTVQVFTDSEYQLPYVLGSAHQGCLPPFPADVFMVPQYGYLTLNNGSQAVGRSSFYCLEYFPSQMLRTGNNFTFSYTFEDVPFHSSYAHSQSLDRLMNPLIDQYLYYLNRTQSNSGTLQQSRLLFSQAGPTSMSLQAKNWLPGPCYRQQRLSKQANDNNNSNFPWTAATKYHLNGRDSLVNPGPAMASHKDDEEKFFPMHGTLIFGKQGTNANDADLEHVMITDEEEIRTTNPVATEQYGNVSNNLQNSNTGPTTENVNHQGALPGMVWQDRDVYLQGPIWAKIPHTDGHFHPSPLMGGFGLKHPPPQIMIKNTPVPANPPTNFSAAKFASFITQYSTGQVSVEIEWELQKENSKRWNPEIQYTSNYNKSVNVDFTVDTNGVYSEPRPIGTRYLTRNL

SEQ ID NO: 12778 - protein, 735 aa, Artificial Sequence
  source: /note="Description of Artificial Sequence: Synthetic polypeptide"
MAADGYLPDWLEDTLSEGIRQWWKLKPGPPPPKPAERHQDDSRGLVLPGYKYLGPFNGLDKGEPVNEADAAALEHDKAYDRQLDSGDNPYLKYNHADAEFQERLKEDTSFGGNLGRAVFQAKKRVLEPLGLVEEPVKTAPGKKRPVEHSPAEPDSSSGTGKAGQQPARKRLNFGQTGDADSVPDPQPLGQPPAAPTSLGSTTMATGSGAPMADNNEGADGVGNSSGNWHCDSQWLGDRVITTSTRTWALPTYNNHLYKQISSQSGASNDNHYFGYSTPWGYFDFNRFHCHFSPRDWQRLINNNWGFRPKRLNFKLFNIQVKEVTQNDGTATIANNLTSTVQVFTDSEYQLPYVLGSAHQGCLPPFPADVFMVPQYGYLTLNNGSQAVGRSSFYCLEYFPSQMLRTGNNFTFSYTFEDVPFHSSYAHSQSLDRLMNPLIDQYLYYLNRTQSNSGTLQQSRLLFSQAGPTSMSLQAKNWLPGPCYRQQRLSKQANDNNNSNFPWTAATKYHLNGRDSLVNPGPAMASHKDDEEKFFPMHGTLIFGKQGTNANDADLEHVMITDEEEIRTTNPVATEQYGNVSNNLQNSNTGPTTENVNHQGALPGMVWQDRDVYLQGPIWAKIPHTDGHFHPSPLMGGFGLKHPPPQIMIKNTPVPANPPTNFSAAKFASFITQYSTGQVSVEIEWELQKENSKRWNPEIQYTSNYNKSVNVDFTVDTNGVYSEPRPIGTRYLTRNL

SEQ ID NO: 12779 - protein, 735 aa, Artificial Sequence
  source: /note="Description of Artificial Sequence: Synthetic polypeptide"
MAADGYLPDWLEDTLSEGIRQWWKLKPGPPPPKPAERHQDDSRGLVLPGYKYLGPFNGLDKGEPVNEADAAALEHDKAYDRQLDSGDNPYLKYNHADAEFQERLKEDTSFGGNLGRAVFQAKKRVLEPLGLVEEPVKTAPGKKRPVEHSPAEPDSSSGTGKAGQQPARRRLNFGQTGDADSVPDPQPLGQPPAAPTSLGSTTMATGSGAPMADNNEGADGVGNSSGNWHCDSQWLGDRVITTSTRTWALPTYNNHLYKQISSQSGASNDNHYFGYSTPWGYFDFNRFHCHFSPRDWQRLINNNWGFRPKRLNFKLFNIQVKEVTQNDGTTTIANNLTSTVQVFTDSEYQLPYVLGSAHQGCLPPFPADVFMVPQYGYLTLNNGSQAVGRSSFYCLEYFPSQMLRTGNNFTFSYTFEDVPFHSSYAHSQSLDRLMNPLIDQYLYYLNRTQSNSGTLQQSRLLFSQAGPTSMSLQAKNWLPGPCYRQQRLSKQANDNNNSNFPWTAATKYHLNGRDSLVNPGPAMASHKDDEEKFFPMHGTLIFGKQGTNANDADLEHVMITDEEEIRTTNPVATEQYGNVSNNLQNSNTGPTTENVNHQGALPGMVWQDRDVYLQGPIWAKIPHTDGHFHPSPLMGGFGLKHPPPQIMIKNTPVPANPPTNFSAAKFASFITQYSTGQVSVEIEWELQKENSKRWNPEIQYTSNYNKSVNVDFTVDTNGVYSEPRPIGTRYLTRNL

SEQ ID NO: 12780 - protein, 735 aa, Artificial Sequence
  source: /note="Description of Artificial Sequence: Synthetic polypeptide"
MAADGYLPDWLEDTLSEGIRQWWKLKPGPPPPKPAERHQDDSRGLVLPGYKYLGPFNGLDKGEPVNEADAAALEHDKAYDRQLDSGDNPYLKYNHADAEFQERLKEDTSFGGNLGRAVFQAKKRVLEPLGLVEEPVKTAPGKKRPVEHSPAEPDSSSGTGKAGQQPARKRLNFGQTGDADSVPDPQPLGQPPAAPTSLGSTTMATGSGAPMADNNEGADGVGNSSGNWHCDSQWLGDRVITTSTRTWALPTYNNHLYKQISSQSGASNDNHYFGYSTPWGYFDFNRFHCHFSPRDWQRLINNNWGFRPKRLNFKLFNIQVKEVTQNDGTTTIANNLTSTVQVFTDSEYQLPYVLGSAHQGCLPPFPADVFMVPQYGYLTLNNGSQAVGRSSFYCLEYFPSQMLRTGNNFTFSYTFEDVPFHSSYAHSQSLDRLMNPLIDQYLYYLNRTQSNSGTLQQSRLLFSQAGPTSMSLQAKNWLPGPCYRQQRLSKQANDNNNSNFPWTAATKYHLNGRDSLVNPGPAMASHKDDEEKFFPMHGTLIFGKQGTNANDADLEHVMITDEEEIRTTNPVATEQYGNVSNNLQNSNTGPTTENVNHQGALPGMVWQDRDVYLQGPIWAKIPHTDGHFHPSPLMGGFGLKHPPPQIMIKNTPVPANPPTNFSAAKFASLITQYSTGQVSVEIEWELQKENSKRWNPEIQYTSNYNKSVNVDFTVDTNGVYSEPRPIGTRYLTRNL

SEQ ID NO: 12781 - protein, 735 aa, Artificial Sequence
  source: /note="Description of Artificial Sequence: Synthetic polypeptide"
MAADGYLPDWLEDTLSEGIRQWWKLKPGPPPPKPAERHQDDSRGLVLPGYKYLGPFNGLDKGEPVNEADAAALEHDKAYDRQLDSGDNPYLKYNHADAEFQERLKEDTSFGGNLGRAVFQAKKRVLEPLGLVEEPVKTAPGKKRPVEHSPAEPDSSSGTGKAGQQPARKRLNFGQTGDADSVPDPQPLGQPPAAPTSLGSTTMATGSGAPMADNNEGADGVGNSSGNWHCDSQWLGDRVITTSTRTWALPTYNNHLYKQISSQSGASNDNHYFGYSTPWGYFDFNRFHCHFSPRDWQRLINNNWGFRPKRLSFKLFNIQVKEVTQNDGTTTIANNLTSTVQVFTDSEYQLPYVLGSAHQGCLPPFPADVFMVPQYGYLTLNNGSQAVGRSSFYCLEYFPSQMLRTGNNFTFSYTFEDVPFHSSYAHSQSLDRLMNPLIDQYLYYLNRTQSNSGTLQQSRLLFSQAGPTSMSLQAKNWLPGPCYRQQRLSKQANDNNNSNFPWTAATKYHLNGRDSLVNPGPAMASHKDDEEKFFPMHGTLIFGKQGTNANDADLEHVMITDEEEIRTTNPVATEQYGNVSNNLQNSNTGPTTENVNHQGALPGMVWQDRDVYLQGPIWAKIPHTDGHFHPSPLMGGFGLKHPPPQIMIKNTPVPANPPTNFSAAKFASFITQYSTGQVSVEIEWELQKENSKRWNPEIQYTSNYNKSVNVDFTVDTNGVYSEPRPIGTRYLTRNL

SEQ ID NO: 12782 - protein, 735 aa, Artificial Sequence
  source: /note="Description of Artificial Sequence: Synthetic polypeptide"
MAADGYLPDWLEDTLSEGIRQWWKLKPGPPPPKPAERHQDDSRGLVLPGYKYLGPFNGLDKGEPVNEADAAALEHDKAYDRQLDSGDNPYLKYNHADAEFQERLKEDTSFGGNLGRAVFQAKKRVLEPLGLVEEPVKTAPGKKRPVEHSPAEPDSSSGTGKAGQQPARKRLNFGQTGDADSVPDPQPLGQPPAAPTSLGSTTMATGSGAPMADNNEGADGVGNSSGNWHCDSQWLGDRVITTSTRTWALPTYNNHLYKQISSQSGASNDNHYFGYSTPWGYFDFNRFHCHFSPRDWQRLINNNWGFRPKRLNFKLFNIQVKEVTQNDGTTTIANNLTSTVQVFTDSEYQLPYVLGSAHQGCLPPFPADVFMVPQYGYLTLNNGSQAVGRSSFYCLEYFPSQMLRTGNNFTFSYTFEDVPFHSSYAHSQSLDRLMNPLIDQYLYYLNRTQSNSGTLQQSRLLFSQAGPTSMSLQAKNWLPGPCYRQQRLSKQANDNNNSNFPWTAATKYHLNGRDSLVNPGPAMASHKDDEEKFFPMHGTLIFGKQGTNANDADLEHVMITDEEEIRTTNPVATGQYGNVSNNLQNSNTGPTTENVNHQGALPGMVWQDRDVYLQGPIWAKIPHTDGHFHPSPLMGGFGLKHPPPQIMIKNTPVPANPPTNFSAAKFASFITQYSTGQVSVEIEWELQKENSKRWNPEIQYTSNYNKSVNVDFTVDTNGVYSEPRPIGTRYLTRNL

SEQ ID NO: 12783 - protein, 735 aa, Artificial Sequence
  source: /note="Description of Artificial Sequence: Synthetic polypeptide"
MAADGYLPDWLEDTLSEGIRQWWKLKPGPPPPKPAERHQDDSRGLVLPGYKYLGPFNGLDKGEPVNEADAAALEHDKAYDRQLDSGDNPYLKYNHADAEFQERLKEDTSFGGNLGRAVFQAKKRVLEPLGLVEEPVKTAPGKKRPVEHSPAEPDSSSGTGKAGQQPARKRLNFGQTGDADSVPDPQPLGQPPAAPTSLGSTTMATGSGAPMADNNEGADGVGNSSGNWHCDSQWLGDRVITTSTRTWALPTYNNHLYKQISSQSGASNDNHYFGYSTPWGYFDFNRFHCHFSPRDWQRLINNNWGFRPKRLNFKLFNIQVKEVTQNDGTTTIANNLTSTVQVFTDSEYQLPYVLGSAHQGCLPPFPADVFMVPQYGYLTLNNGSQAVGRSSFYCLEYFPSQMLRTGNNFTFSYTFEDVPFHSSYAHSQSLDRLMNPLIDQYLYYLNRTQSNSGTLQQSRLLFSQAGPTSMSLQAKNWLPGPCYRQQRLSKQANDNNNSNFPWTAATKYHLNGRDSLVNPGPAMASHKDDEEKFFPMHGTLIFGKQGTNANDADLEHVMITDEEEIRTTNPVATEQYGNVPNNLQNSNTGPTTENVNHQGALPGMVWQDRDVYLQGPIWAKIPHTDGHFHPSPLMGGFGLKHPPPQIMIKNTPVPANPPTNFSAAKFASFITQYSTGQVSVEIEWELQKENSKRWNPEIQYTSNYNKSVNVDFTVDTNGVYSEPRPIGTRYLTRNL

SEQ ID NO: 12784 - protein, 735 aa, Artificial Sequence
  source: /note="Description of Artificial Sequence: Synthetic polypeptide"
MAADGYLPDWLEDTLSEGIRQWWKLKPGPPPPKPAERHQDDSRGLVLPGYKYLGPFNGLDKGEPVNEADAAALEHDKAYDRQLDSGDNPYLKYNHADAEFQERLKEDTSFGGNLGRAVFQAKKRVLEPLGLVEEPVKTAPGKKRPVEHSPAEPDSSSGTGKAGQQPARKRLNFGQTGDADSVPDPQPLGQPPAAPTSLGSTTMATGSGAPMADNNEGADGVGNSSGNWHCDSQWLGDRVITTSTRTWALPTYNNHLYKQISSQSGASNDNHYFGYSTPWGYFDFNRFHCHFSPRDWQRLINNNWGFRPKRLNFKLFNIQVKEVTQNDGTTTIANNLTSTVQVFTDSEYQLPYVLGSAHQGCLPPFPADVFMVPQYGYLTPNNGSQAVGRSSFYCLEYFPSQMLRTGNNFTFSYTFEDVPFHSSYAHSQSLDRLMNPLIDQYLYYLNRTQSNSGTLQQSRLLFSQAGPTSMSLQAKNWLPGPCYRQQRLSKQANDNNNSNFPWTAATKYHLNGRDSLVNPGPAMASHKDDEEKFFPMHGTLIFGKQGTNANDADLEHVMITDEEEIRTTNPVATEQYGNVSNNLQNSNTGPTTENVNHQGALPGMVWQDRDVYLQGPIWAKIPHTDGHFHPSPLMGGFGLKHPPPQIMIKNTPVPANPPTNFSAAKFASFITQYSTGQVSVEIEWELQKENSKRWNPEIQYTSNYNKSVNVDFTVDTNGVYSEPRPIGTRYLTRNL

SEQ ID NO: 12785 - protein, 735 aa, Artificial Sequence
  source: /note="Description of Artificial Sequence: Synthetic polypeptide"
MAADGYLPDWLEDTLSEGIRQWWKLKPGPPPPKPAERHQDDSRGLVLPGYKYLGPFNGLDKGEPVNEADAAALEHDKAYDRQLDSGDNPYLKYNHADAEFQERLKEDTSFGGNLGRAAFQAKKRVLEPLGLVEEPVKTAPGKKRPVEHSPAEPDSSSGTGKAGQQPARKRLNFGQTGDADSVPDPQPLGQPPAAPTSLGSTTMATGSGAPMADNNEGADGVGNSSGNWHCDSQWLGDRVITTSTRTWALPTYNNHLYKQISSQSGASNDNHYFGYSTPWGYFDFNRFHCHFSPRDWQRLINNNWGFRPKRLNFKLFNIQVKEVTQNDGTTTIANNLTSTVQVFTDSEYQLPYVLGSAHQGCLPPFPADVFMVPQYGYLTLNNGSQAVGRSSFYCLEYFPSQMLRTGNNFTFSYTFEDVPFHSSYAHSQSLDRLMNPLIDQYLYYLNRTQSNSGTLQQSRLLFSQAGPTSMSLQAKNWLPGPCYRQQRLSKQANDNNNSNFPWTAATKYHLNGRDSLVNPGPAMASHKDDEEKFFPMHGTLIFGKQGTNANDADLEHVMITDEEEIRTTNPVATEQYGNVSNNLQNSNTGPTTENVNHQGALPGMVWQDRDVYLQGPIWAKIPHTDGHFHPSPLMGGFGLKHPPPQIMIKNTPVPANPPTNFSAAKFASFITQYSTGQVSVEIEWELQKENSKRWNPEIQYTSNYNKSVNVDFTVDTNGVYSEPRPIGTRYLTRNL

SEQ ID NO: 12786 - protein, 735 aa, Artificial Sequence
  source: /note="Description of Artificial Sequence: Synthetic polypeptide"
MAADGYLPDWLEDTLSEGIRQWWKLKPGPPPPKPAERHQDDSRGLVLPGYKYLGPFNGLDKGEPVNEADAAALEHDKAYDRQLDSGDNPYLKYNHADAEFQERLKEDTSFGGNLGRAVFQAKKRVLEPLGLVEEPVKTAPGKKRPVEHSPAEPDSSSGTGKAGQQPARKRLNFGQTGDADSVPDPQPLGQPPAAPTSLGSTTMATGSGAPMADNNEGADGVGNSSGNWHCDSQWLGDRVITTSTRTWALPTYNNHLYKQISSQSGASNDNHYFGYSTPWGYFDFNRFHCHFSPRDWQRLINNNWGFRPKRLNFKLFNIQVKEVTQNDGTTTIANNLTSTVQVFTDSEYQLPYVLGSAHQGCLPPFPADVFMVPQYGYLTLNNGSQAVGRSSFYCLEYFPPQMLRTGNNFTFSYTFEDVPFHSSYAHSQSLDRLMNPLIDQYLYYLNRTQSNSGTLQQSRLLFSQAGPTSMSLQAKNWLPGPCYRQQRLSKQANDNNNSNFPWTAATKYHLNGRDSLVNPGPAMASHKDDEEKFFPMHGTLIFGKQGTNANDADLEHVMITDEEEIRTTNPVATEQYGNVSNNLQNSNTGPTTENVNHQGALPGMVWQDRDVYLQGPIWAKIPHTDGHFHPSPLMGGFGLKHPPPQIMIKNTPVPANPPTNFSAAKFASFITQYSTGQVSVEIEWELQKENSKRWNPEIQYTSNYNKSVNVDFTVDTNGVYSEPRPIGTRYLTRNL

SEQ ID NO: 12787 - protein, 735 aa, Artificial Sequence
  source: /note="Description of Artificial Sequence: Synthetic polypeptide"
MAADGYLPDWLEDTLPEGIRQWWKLKPGPPPPKPAERHQDDSRGLVLPGYKYLGPFNGLDKGEPVNEADAAALEHDKAYDRQLDSGDNPYLKYNHADAEFQERLKEDTSFGGNLGRAVFQAKKRVLEPLGLVEEPVKTAPGKKRPVEHSPAEPDSSSGTGKAGQQPARKRLNFGQTGDADSVPDPQPLGQPPAAPTSLGSTTMATGSGAPMADNNEGADGVGNSSGNWHCDSQWLGDRVITTSTRTWALPTYNNHLYKQISSQSGASNDNHYFGYSTPWGYFDFNRFHCHFSPRDWQRLINNNWGFRPKRLNFKLFNIQVKEVTQNDGTTTIANNLTSTVQVFTDSEYQLPYVLGSAHQGCLPPFPADVFMVPQYGYLTLNNGSQAVGRSSFYCLEYFPSQMLRTGNNFTFSYTFEDVPFHSSYAHSQSLDRLMNPLIDQYLYYLNRTQSNSGTLQQSRLLFSQAGPTSMSLQAKNWLPGPCYRQQRLSKQANDNNNSNFPWTAATKYHLNGRDSLVNPGPAMASHKDDEEKFFPMHGTLIFGKQGTNANDADLEHVMITDEEEIRTTNPVATEQYGNVSNNLQNSNTGPTTENVNHQGALPGMVWQDRDVYLQGPIWAKIPHTDGHFHPSPLMGGFGLKHPPPQIMIKNTPVPANPPTNFSAAKFASFITQYSTGQVSVEIEWELQKENSKRWNPEIQYTSNYNKSVNVDFTVDTNGVYSEPRPIGTRYLTRNL

SEQ ID NO: 12788 - protein, 735 aa, Artificial Sequence
  source: /note="Description of Artificial Sequence: Synthetic polypeptide"
MAADGYLPDWLEDTLSEGIRQWWKLKPGPPPPKPAERHQDDSRGLVLPGYKYLGPFNGLDKGEPVNEADAAALEHDKAYDRQLDSGDNPYLKYNHADAEFQERLKEDTSFGGNLGRAVFQAKKRVLEPLGLVEEPVKTAPGKKRPVEHSPAEPDSSSGTGKAGQQPARKRLNFGQTGDADSVPDPQPLGQPPAAPTSLGSTTMATGSGAPMADNNEGADGVGNSSGNWHCDSQWLGDRVITTSTRTWALPTYNNHLYKQISSQSGASNDNHYFGYSTPWGYFDFNRFHCHFSPRDWQRLINNNWGFRPKRLNFKLFNIQVKEVTQNDGTTTIANNLTSTVQVFTDSEYQLPYVLGSAHQGCLPPFPADVFMVPQYGYLTLNNGSQAVGRSSFYCLEYFPSQMLRTGNNFTFSYTFEDVPFHSSYAHSQSLDRLMNPLIDQYLYYLNRTQSNSGTLQQSRLLFSQAGPTSMSLQAKNWLPGPCYRRQRLSKQANDNNNSNFPWTAATKYHLNGRDSLVNPGPAMASHKDDEEKFFPMHGTLIFGKQGTNANDADLEHVMITDEEEIRTTNPVATEQYGNVSNNLQNSNTGPTTENVNHQGALPGMVWQDRDVYLQGPIWAKIPHTDGHFHPSPLMGGFGLKHPPPQIMIKNTPVPANPPTNFSAAKFASFITQYSTGQVSVEIEWELQKENSKRWNPEIQYTSNYNKSVNVDFTVDTNGVYSEPRPIGTRYLTRNL

SEQ ID NO: 12789 - protein, 735 aa, Artificial Sequence
  source: /note="Description of Artificial Sequence: Synthetic polypeptide"
MAADGYLPDWLEDTLSEGIRQWWKLKPGPPPPKPAERHQDDSRGLVLPGYKYLGPFNGLDKGEPVNEADAAALEHDKAYDRQLDSGDNPYLKYNHADAEFQERLKEDTSFGGNLGRAVFQAKKRVLEPLGLVEEPVKTAPGKKRPVEHSPAEPDSSSGTGKAGQQPARKRLNFGQTGDADSVPDPQPLGQPPAAPTSLGSTTMATGSGAPMADNNEGADGVGNSSGNWHCDSQWLGDRVITTSTRTWALPTYNNHLYKQISSQSGASNDNHYFGYSTPWGYFDFNRFHCHFSPRDWQRLINNNWGFRPKRLNFKLFNIQVKEVTQNDGTTTIANNLTSTVQVFTDSEYQLPYVLGSAHQGCLPPFPADVFMVPQYGYLTLNNGSQAVGRSSFYCLEYLPSQMLRTGNNFTFSYTFEDVPFHSSYAHSQSLDRLMNPLIDQYLYYLNRTQSNSGTLQQSRLLFSQAGPTSMSLQAKNWLPGPCYRQQRLSKQANDNNNSNFPWTAATKYHLNGRDSLVNPGPAMASHKDDEEKFFPMHGTLIFGKQGTNANDADLEHVMITDEEEIRTTNPVATEQYGNVSNNLQNSNTGPTTENVNHQGALPGMVWQDRDVYLQGPIWAKIPHTDGHFHPSPLMGGFGLKHPPPQIMIKNTPVPANPPTNFSAAKFASFITQYSTGQVSVEIEWELQKENSKRWNPEIQYTSNYNKSVNVDFTVDTNGVYSEPRPIGTRYLTRNL

SEQ ID NO: 12790 - protein, 735 aa, Artificial Sequence
  source: /note="Description of Artificial Sequence: Synthetic polypeptide"
MAADGYLPDWLEDTLSEGIRQWWKLKPGPPPPKPAERHQDDSRGLVLPGYKYLGPFNGLDKGEPVNEADAAALEHDKAYDRQLDSGDNPYLKYNHADAEFQERLKEDTSFGGNLGRAVFQAKKRVLEPLGLVEEPVKTAPGKKRPVEHSPAEPDSSSGTGKAGQQPARKRLNFGQTGDADSVPDPQPLGQPPAAPTSLGSTTMATGSGAPMADNNEGADGVGNSSGNWHCDSQWLGDRVITTSTRTWALPTYNNHLYKQISSQSGASNDNHYFGYSTPWGYFDFNRFHCHFSPRDWQRLINNNWGFRPKRLNFKLFNIQVKEVTQNDGTTTIANNLTSTVQVFTDSEYQLPYVLGSAHQGCLPPFPADVFMVPQYGYLTLNNGSQAVGRSSFYCLEYFPSQMLRTGNNFTFSYTFEDVPFHSSYAHSQSLDRLMNPLIDQYLYYLNRTQSNSGTLQQSRLLFSQAGPTSMSLQAKNWLPGPCYRQQRLSKQANDNNNGNFPWTAATKYHLNGRDSLVNPGPAMASHKDDEEKFFPMHGTLIFGKQGTNANDADLEHVMITDEEEIRTTNPVATEQYGNVSNNLQNSNTGPTTENVNHQGALPGMVWQDRDVYLQGPIWAKIPHTDGHFHPSPLMGGFGLKHPPPQIMIKNTPVPANPPTNFSAAKFASFITQYSTGQVSVEIEWELQKENSKRWNPEIQYTSNYNKSVNVDFTVDTNGVYSEPRPIGTRYLTRNL

SEQ ID NO: 12791 - protein, 735 aa, Artificial Sequence
  source: /note="Description of Artificial Sequence: Synthetic polypeptide"
MAADGYLPDWLEDTLSEGIRQWWKLKPGPPPPKPAERHQDDSRGLVLPGYKYLGPFNGLDKGEPVNEADAAALEHDKAYDRQFDSGDNPYLKYNHADAEFQERLKEDTSFGGNLGRAVFQAKKRVLEPLGLVEEPVKTAPGKKRPVEHSPAEPDSSSGTGKAGQQPARKRLNFGQTGDADSVPDPQPLGQPPAAPTSLGSTTMATGSGAPMADNNEGADGVGNSSGNWHCDSQWLGDRVITTSTRTWALPTYNNHLYKQISSQSGASNDNHYFGYSTPWGYFDFNRFHCHFSPRDWQRLINNNWGFRPKRLNFKLFNIQVKEVTQNDGTTTIANNLTSTVQVFTDSEYQLPYVLGSAHQGCLPPFPADVFMVPQYGYLTLNNGSQAVGRSSFYCLEYFPSQMLRTGNNFTFSYTFEDVPFHSSYAHSQSLDRLMNPLIDQYLYYLNRTQSNSGTLQQSRLLFSQAGPTSMSLQAKNWLPGPCYRQQRLSKQANDNNNSNFPWTAATKYHLNGRDSLVNPGPAMASHKDDEEKFFPMHGTLIFGKQGTNANDADLEHVMITDEEEIRTTNPVATEQYGNVSNNLQNSNTGPTTENVNHQGALPGMVWQDRDVYLQGPIWAKIPHTDGHFHPSPLMGGFGLKHPPPQIMIKNTPVPANPPTNFSAAKFASFITQYSTGQVSVEIEWELQKENSKRWNPEIQYTSNYNKSVNVDFTVDTNGVYSEPRPIGTRYLTRNL

SEQ ID NO: 12792 - protein, 735 aa, Artificial Sequence
  source: /note="Description of Artificial Sequence: Synthetic polypeptide"
MAADGYLPDWLEDTLSEGIRQWWKLKPGPPPPKPAERHQDDSRGLVLPGYKYLGPFNGLDKGEPVNEADAAALEHDKAYDRQLDSGDNPYLKYNHADAEFQERLKEDTSFGGNLGRAVFQAKKRVLEPLGLVEEPVKTAPGKKRPVEHSPAEPDSSSGTGKAGQQPARKRLNFGQTGDADSVPDPQPLGQPPAAPTSLGSTTMATGSGAPMADNNEGADGVGNSSGNWHCDSQWLGDRVITTSTRTWALPTYNNHLYKQISSQSGASNDNHYFGYSTPWGYFDFNRFHCHFSPRDRQRLINNNWGFRPKRLNFKLFNIQVKEVTQNDGTTTIANNLTSTVQVFTDSEYQLPYVLGSAHQGCLPPFPADVFMVPQYGYLTLNNGSQAVGRSSFYCLEYFPSQMLRTGNNFTFSYTFEDVPFHSSYAHSQSLDRLMNPLIDQYLYYLNRTQSNSGTLQQSRLLFSQAGPTSMSLQAKNWLPGPCYRQQRLSKQANDNNNSNFPWTAATKYHLNGRDSLVNPGPAMASHKDDEEKFFPMHGTLIFGKQGTNANDADLEHVMITDEEEIRTTNPVATEQYGNVSNNLQNSNTGPTTENVNHQGALPGMVWQDRDVYLQGPIWAKIPHTDGHFHPSPLMGGFGLKHPPPQIMIKNTPVPANPPTNFSAAKFASFITQYSTGQVSVEIEWELQKENSKRWNPEIQYTSNYNKSVNVDFTVDTNGVYSEPRPIGTRYLTRNL

SEQ ID NO: 12793 - protein, 735 aa, Artificial Sequence
  source: /note="Description of Artificial Sequence: Synthetic polypeptide"
MAADGYLPDWLEDTLSEGIRQWWKLKPGPPPPKPAERHQDDSRGLVLPGYKYLGPFNGLDKGEPVNEADAAALEHDKAYDRQLDSGDNPYLKYNHADAEFQERLKEDTSFGGNLGRAVFQAKKRVLEPLGLVEEPVKTAPGKKRPVEHSPAEPDSSSGTGKAGQQPARKRLNFGQTGDADSVPDPQPLGQPPAAPTSLGSTTMATGSGAPMADNNEGADGVGNSSGNWHCDSQWLGDRVITTSTRTWALPAYNNHLYKQISSQSGASNDNHYFGYSTPWGYFDFNRFHCHFSPRDWQRLINNNWGFRPKRLNFKLFNIQVKEVTQNDGTTTIANNLTSTVQVFTDSEYQLPYVLGSAHQGCLPPFPADVFMVPQYGYLTLNNGSQAVGRSSFYCLEYFPSQMLRTGNNFTFSYTFEDVPFHSSYAHSQSLDRLMNPLIDQYLYYLNRTQSNSGTLQQSRLLFSQAGPTSMSLQAKNWLPGPCYRQQRLSKQANDNNNSNFPWTAATKYHLNGRDSLVNPGPAMASHKDDEEKFFPMHGTLIFGKQGTNANDADLEHVMITDEEEIRTTNPVATEQYGNVSNNLQNSNTGPTTENVNHQGALPGMVWQDRDVYLQGPIWAKIPHTDGHFHPSPLMGGFGLKHPPPQIMIKNTPVPANPPTNFSAAKFASFITQYSTGQVSVEIEWELQKENSKRWNPEIQYTSNYNKSVNVDFTVDTNGVYSEPRPIGTRYLTRNL

SEQ ID NO: 12794 - protein, 734 aa, Artificial Sequence
  source: /note="Description of Artificial Sequence: Synthetic polypeptide"
MAADGYLPDWLEDTLSEGIRQWWKLKPGPPPPKPAERHQDDSRGLVLPGYKYLGPFNGLDKGEPVNEADAAALEHDKAYDRQLDSGDNPYLKYNHADAEFQERLKEDTSFGGNLGRAVFQAKKRVLEPLGLVEEPVKTAPGKKRPVEHSPAEPDSSSGTGKAGQQPARKRLNFGQTGDADSVPDPQPLGQPPAAPTSLGSTTMATGSGAPMADNNEGADGVGNSSGNWHCDSQWLGDRVITTSTRTWALPTYNNHLYKQISSQSGASNDNHYFGYSTPWGYFDFNRFHCHFSPRDWQRLINNNWGFRPKRLNFKLFNIQVKEVTQNDGTTTIANNLTSTVQVFTDSEYQLPYVLGSAHQGCLPPFPADAFMVPQYGYLTLNNGSQAVGRSSFYCLEYFPSQMLRTGNNFTFSYTFEDVPFHSSYAHSQSLDRLMNPLIDQYLYYLNRTQSNSGTLQQSRLLFSQAGPTSMSLQAKNWLPGPCYRQQRLSKQANDNNSNFPWTAATKYHLNGRDSLVNPGPAMASHKDDEEKFFPMHGTLIFGKQGTNANDADLEHVMITDEEEIRTTNPVATEQYGNVSNNLQNSNTGPTTENVNHQGALPGMVWQDRDVYLQGPIWAKIPHTDGHFHPSPLMGGFGLKHPPPQIMIKNTPVPANPPTNFSAAKFASFITQYSTGQVSVEIEWELQKENSKRWNPEIQYTSNYNKSVNVDFTVDTNGVYSEPRPIGTRYLTRNL

SEQ ID NO: 12795 - protein, 735 aa, Artificial Sequence
  source: /note="Description of Artificial Sequence: Synthetic polypeptide"
MAADGYLPDWLEDTLSEGIRQWWKLKPGPPPPKPAERHQDDSRGLVLPGYKYLGPFNGLDKGEPVNEADAAALEHDKAYDRQLDSGDNPYLKYNHADAEFQERLKEDTSFGGNLGRAVFQAKKRVLEPLGLVEEPVKTAPGKKRPVEHSPAEPDSSSGTGKAGQQPARKRLNFGQTGDADSVPDPQPLGQPPAAPTSLGSTTMATGSGAPMADNNEGADGVGNSSGNWHCDSQWLGDRVITTSTRTWALPTYNNHLYKQISSQSGASNDNHYFGYSTPWGYFDFNRFHCHFSPRGWQRLINNNWGFRPKRLNFKLFNIQVKEVTQNDGTTTIANNLTSTVQVFTDSEYQLPYVLGSAHQGCLPPFPADVFMVPQYGYLTLNNGSQAVGRSSFYCLEYFPSQMLRTGNNFTFSYTFEDVPFHSSYAHSQSLDRLMNPLIDQYLYYLNRTQSNSGTLQQSRLLFSQAGPTSMSLQAKNWLPGPCYRQQRLSKQANDNNNSNFPWTAATKYHLNGRDSLVNPGPAMASHKDDEEKFFPMHGTLIFGKQGTNANDADLEHVMITDEEEIRTTNPVATEQYGNVSNNLQNSNTGPTTENVNHQGALPGMVWQDRDVYLQGPIWAKIPHTDGHFHPSPLMGGFGLKHPPPQIMIKNTPVPANPPTNFSAAKFASFITQYSTGQVSVEIEWELQKENSKRWNPEIQYTSNYNKSVNVDFTVDTNGVYSEPRPIGTRYLTRNL

SEQ ID NO: 12796 - protein, 735 aa, Artificial Sequence
  source: /note="Description of Artificial Sequence: Synthetic polypeptide"
MAADGYLPDWLEDTLSEGIRQWWKLKPGPPPPKPAERHQDDSRGLVLPGYKYLGPFNGLDKGEPVNEADAAALEHDKAYDRQLDSGDNPYLKYNHADAEFQERLKEDTSFGGNLGRAVFQAKKRVLEPLGLVEEPVKTAPGKKRPVEHSPAEPDSSSGTGKAGQQPARKRLNFGQTGDADSVPDPQPLGQPPAAPTSLGSTTMATGSGAPMADNNEGADGVGNSSGNWHCDSQWLGDRVITTSTRTWALPTYNNHLYKQISSQSGASNDNHYFGYSTPWGYFDFNRFHCHFSPRDWQRLINNNWGFRPKRLNFKLFNIQVKEVTQNDGTTTIANNLTSTVQVFTDSEYQLPYVLGSAHQGCLPPFPADVFMVPQYGYLTLNNGSQAVGRSSFYCLEYFPSQMLRTGNNFTFSYTFEDVPFHSSYAHSQSLDRLMNPLIDQYLYYLNGTQSNSGTLQQSRLLFSQAGPTSMSLQAKNWLPGPCYRQQRLSKQANDNNNSNFPWTAATKYHLNGRDSLVNPGPAMASHKDDEEKFFPMHGTLIFGKQGTNANDADLEHVMITDEEEIRTTNPVATEQYGNVSNNLQNSNTGPTTENVNHQGALPGMVWQDRDVYLQGPIWAKIPHTDGHFHPSPLMGGFGLKHPPPQIMIKNTPVPANPPTNFSAAKFASFITQYSTGQVSVEIEWELQKENSKRWNPEIQYTSNYNKSVNVDFTVDTNGVYSEPRPIGTRYLTRNL

SEQ ID NO: 12797 - protein, 735 aa, Artificial Sequence
  source: /note="Description of Artificial Sequence: Synthetic polypeptide"
MAADGYLPDWLEDTLSEGIRQWWKLKPGPPPPKPAERHQDDSRGLVLPGYKYLGPFNGLDKGEPVNEADAAALEHDKAYDRQLDSGDNPYLKYNHADAEFQERLKEDTSFGGNLGRAVFQAKKRVLEPLGLVEEPVKTAPGKKRPVEHSPAEPDSSSGTGKAGQQPARKRLNFGQTGDADSVPDPQPLGQPPAAPTSLGSTTMATGSGAPMADNNEGADGVGNSSGNWHCDSQWLGDRVITTSTRTWALPTYNNHLYKQISSQSGASNDNHYFGYSTPWGYFDFNRFHCHLSPRDWQRLINNNWGFRPKRLNFKLFNIQVKEVTQNDGTTTIANNLTSTVQVFTDSEYQLPYVLGSAHQGCLPPFPADVFMVPQYGYLTLNNGSQAVGRSSFYCLEYFPSQMLRTGNNFTFSYTFEDVPFHSSYAHSQSLDRLMNPLIDQYLYYLNRTQSNSGTLQQSRLLFSQAGPTSMSLQAKNWLPGPCYRQQRLSKQANDNNNSNFPWTAATKYHLNGRDSLVNPGPAMASHKDDEEKFFPMHGTLIFGKQGTNANDADLEHVMITDEEEIRTTNPVATEQYGNVSNNLQNSNTGPTTENVNHQGALPGMVWQDRDVYLQGPIWAKIPHTDGHFHPSPLMGGFGLKHPPPQIMIKNTPVPANPPTNFSAAKFASFITQYSTGQVSVEIEWELQKENSKRWNPEIQYTSNYNKSVNVDFTVDTNGVYSEPRPIGTRYLTRNL

SEQ ID NO: 12798 - protein, 735 aa, Artificial Sequence
  source: /note="Description of Artificial Sequence: Synthetic polypeptide"
MAADGYLPDWLEDTLSEGIRQWWKLKPGPPPPKPAERHQDDSRGLVLPGYKYLGPFNGLDKGEPVNEADAAALGHDKAYDRQLDSGDNPYLKYNHADAEFQERLKEDTSFGGNLGRAVFQAKKRVLEPLGLVEEPVKTAPGKKRPVEHSPAEPDSSSGTGKAGQQPARKRLNFGQTGDADSVPDPQPLGQPPAAPTSLGSTTMATGSGAPMADNNEGADGVGNSSGNWHCDSQWLGDRVITTSTRTWALPTYNNHLYKQISSQSGASNDDHYFGYSTPWGYFDFNRFHCHFSPRDWQRLINNNWGFRPKRLNFKLFNIQVKEVTQNDGTTTIANNLTSTVQVFTDSEYQLPYVLGSAHQGCLPPFPADVFMVPQYGYLTLNNGSQAVGRSSFYCLEYFPSQMLRTGNNFTFSYTFEDVPFHSSYAHSQSLDRLMNPLIDQYLYYLNRTQSNSGTLQQSRLLFSQAGPTSMSLQAKNWLPGPCYRQQRLSKQANDNNNSNFPWTAATKYHLNGRDSLVNPGPAMASHKDDEEKFFPMHGTLIFGKQGTNANDADLEHVMITDEEEIRTTNPVATEQYGNVSNNLQNSNTGPTTENVNHQGALPGMVWQDRDVYLQGPIWAKIPHTDGHFHPSPLMGGFGLKHPPPQIMIKNTPVPANPPTNFSAAKFASFITQYSTGQVSVEIEWELQKENSKRWNPEIQYTSNYNKSVNVDFTVDTNGVYSEPRPIGTRYLTRNL

SEQ ID NO: 12799 - protein, 735 aa, Artificial Sequence
  source: /note="Description of Artificial Sequence: Synthetic polypeptide"
MAADGYLPDWLEDTLSEGIRQWWKLKPGPPPPKPAERHQDDSRGLVLPGYKYLGPFNGLDKGEPVNEADAAALEHDKAYDRQLDSGDNPYLKYNHADAEFQERLKEDTSFGGNLGRAVFQAKKRVLEPLGLVEEPVKTAPGKKRPVEHSPAEPDSSSGTGKAGQQPARKRLNFGQTGDADSVPDPQPLGQPPAAPTSLGSTTMATGSGAPMADNNEGADGVGNSSGNWHCDSQWLGDRVITTSTRTWALPTYNNHLYKQISSQSGASNDNHYFGYSTPWGYFDFNRFHCHFSPRDWQRLINNNWGFRPKRLNFKLFNIQVKEVTQNDGTTTIANNLTSTVQVFTDSEYQLPYVLGSAHQGCLPPFPADVFMVPQYGYLTLNNGSQAVGRSSFYCLEYFPSQMLRTGNNFTFSYTFEDVPFHSSYAHSQSLDRLMNPLIDQYLYYLNRTQSNSGTLQQSRLLFSQAGPTSMSLQAKNWLPGPCYRQQRLSKQANDNNNSNFPWTAATKYHLNGRDSLVNPGPAMASHKDDEEKFFPMHGTLIFGKQGTNANDADLEHVMITDEEEIRTTNPVATEQYGNVSNNLQNSNTGPTTENVNHQGALPGMVWQDRDVYLQGPIWAKIPHTDGHFRPSPLMGGFGLKHPPPQIMIKNTPVPANPPTNFSAAKFASFITQYSTGQVSVEIEWELQKENSKRWNPEIQYTSNYNKSVNVDFTVDTNGVYSEPRPIGTRYLTRNL

SEQ ID NO: 12800 - protein, 735 aa, Artificial Sequence
  source: /note="Description of Artificial Sequence: Synthetic polypeptide"
MAADGYLPDWLEDTLSEGIRQWWKLKPGPPPPKPAERHQDDSRGLVLPGYKYLGPFNGLDKGEPVNEADAAALEHDKAYDRQLDSGDNPYLKYNHADAEFQERLKEDTSFGGNLGRAVFQAKKRVLEPLGLVEEPVKTAPGKKRPVEHSPAEPDSSSGTGKAGQQPARKRLNFGQTGDADSVPDPQPLGQPPAAPTSLGSTTMATGSGAPMADNNEGADGVGNSSGNWHCDSQWLGDRVITTSTRTWALPTYNNHLYKQISSQSGASNDNHYFGYSTPWGYFDFNRFHCHFSPRDWQRLINNNWGFRPKRLNFKLFNIQVKEVTQNDGTTTIANNLTSTVQVFTDSEYQLPYVLGSAHQGCLPPFPADVFMVPQYGYLTLNNGSQAVGRSSFYCLEYFPSQMLRTGNNFTFSYTFEDVPFHSSYAHSQSLDRLMNPLIDQYLYYLNRTQSNSGTLQQSRLLFSQAGPTSMSLQAKNWLPGPCYRQQRLSKQANDNNNSNFPWTAATKYHLNGRDSLVNPGPAMASHKDDEEKFFPMHGTLIFGKQGTNANDADLEHVMITDEEEIRTTNPVATEQYGNVSNNLQNSNTGPTTENVNHQGALPGMVWQDRDVYLQGPIWAKIPHTDGHFHPSPLMGGFGLKHPPPQIMIKNTPVPANPPTNFSAAKSASFITQYSTGQVSVEIEWELQKENSKRWNPEIQYTSNYNKSVNVDFTVDTNGVYSEPRPIGTRYLTRNL

SEQ ID NO: 12801 - protein, 735 aa, Artificial Sequence
  source: /note="Description of Artificial Sequence: Synthetic polypeptide"
MAADGYLPDWLEDTLSEGIRQWWKLKPGPPPPKPAERHQDDSRGLVLPGYKYLGPFNGLDKGEPVNEADAAALEHDKAYDRQLDSGDNPYLKYNHADAEFQERLKEDTSFGGNLGRAVFQAKKRVLEPLGLVEEPVKTAPGKKRPVEHSPAEPDSSSGTGKAGQQPARKRLNFGQTGDADSVPDPQPLGQPPAAPTSLGSTTMATGSGAPMADNNEGADGVGNSSGNWHCDSQWLGDRVITTSTRTWALPTYNNHLYKQISSQSGASNDNHYFGYSTPWGYFDFNRFHCHFSPRDWQRLINNNWGFRPKRLNFKLFNIQVKGVTQNDGTTTIANNLTSTVQVFTDSEYQLPYVLGSAHQGCLPPFPADVFMVPQYGYLTLNNGSQAVGRSSFYCLEYFPSQMLRTGNNFTFSYTFEDVPFHSSYAHSQSLDRLMNPLIDQYLYYLNRTQSNSGTLQQSRLLFSQAGPTSMSLQAKNWLPGPCYRQQRLSKQANDNNNSNFPWTAATKYHLNGRDSLVNPGPAMASHKDDEEKFFPMHGTLIFGKQGTNANDADLEHVMITDEEEIRTTNPVATEQYGNVSNNLQNSNTGPTTENVNHQGALPGMVWQDRDVYLQGPIWAKIPHTDGHFHPSPLMGGFGLKHPPPQIMIKNTPVPANPPTNFSAAKFASFITQYSTGQVSVEIEWELQKENSKRWNPEIQYTSNYNKSVNVDFTVDTNGVYSEPRPIGTRYLTRNL

SEQ ID NO: 12802 - protein, 735 aa, Artificial Sequence
  source: /note="Description of Artificial Sequence: Synthetic polypeptide"
MAADGYLPDWLEDTLSEGIRQWWKLKPGPPPPKPAERHQDDSRGLVLPGYKYLGPFNGLDKGEPVNEADAAALEHDKAYDRQLDSGDNPYLKYNHADAEFQERLKEDTSFGGNLGRAVFQAKKRVLEPLGLVEEPVKTAPGKKRPVEHSPAEPDSSSGTGKAGQQPARKRLNFGQTGDADSVPDPQPLGQPPAAPTSLGSTTMATGSGAPMADNNEGADGVGNSSGNWHCDSQWLGDRVITTSTRTWALPTYNNHLYKQISSQSGASNDNHYFGYSTPWGYFDFNRFHCHFSPRDWQRLINNNWGFRPKRLNFKLFNIQVKEVTQNDGTTTIANNLTSTVQVFTDSEYQLPYVLGSAHQGCLPPFPADVFMVPQYGYLTLNNGSQAVGRSSFYCLEYFPSQMLRTGNNFTFSYTFEDVPFHSSYAHSQSLDRLMNPLIDQYLYYLNRTQSNSGTLQQSRLLFSQAGPTSMSLQAKNWLPGPCYRQQRLSKQANDNNNSNFPWTAATKYHLNGRDSLVNPGPAMASHKDDEEKFFPMHGTPIFGKQGTNANDADLEHVMITDEEEIRTTNPVATEQYGNVSNNLQNSNTGPTTENVNHQGALPGMVWQDRDVYLQGPIWAKIPHTDGHFHPSPLMGGFGLKHPPPQIMIKNTPVPANPPTNFSAAKFASFITQYSTGQVSVEIEWELQKENSKRWNPEIQYTSNYNKSVNVDFTVDTNGVYSEPRPIGTRYLTRNL

SEQ ID NO: 12803 - protein, 735 aa, Artificial Sequence
  source: /note="Description of Artificial Sequence: Synthetic polypeptide"
MAADGYLPDWLEDTLSEGIRQWWKLKPGPPPPKPAERHQDDSRGLVLPGYKYLGPFNGLDKGEPVNEADAAALEHDKAYDRQLDSGDNPYLKYNHADAEFQERLKEDTSFGGNLGRAVFQAKKGVLEPLGLVEEPVKTAPGKKRPVEHSPAEPDSSSGTGKAGQQPARKRLNFGQTGDADSVPDPQPLGQPPAAPTSLGSTTMATGSGAPMADNNEGADGVGNSSGNWHCDSQWLGDRVITTSTRTWALPTYNNHLYKQISSQSGASNDNHYFGYSTPWGYFDFNRFHCHFSPRDWQRLINNNWGFRPKRLNFKLFNIQVKEVTQNDGTTTIANNLTSTVQVFTDSEYQLPYVLGSAHQGCLPPFPADVFMVPQYGYLTLNNGSQAVGRSSFYCLEYFPSQMLRTGNNFTFSYTFEDVPFHSSYAHSQSLDRLMNPLIDQYLYYLNRTQSNSGTLQQSRLLFSQAGPTSMSLQAKNWLPGPCYRQQRLSKQANDNNNSNFPWTAATKYHLNGRDSLVNPGPAMASHKDDEEKFFPMHGTLIFGKQGTNANDADLEHVMITDEEEIRTTNPVATEQYGNVSNNLQNSNTGPTTENVNHQGALPGMVWQDRDVYLQGPIWAKIPHTDGHFHPSPLMGGFGLKHPPPQIMIKNTPVPANPPTNFSAAKFASFITQYSTGQVSVEIEWELQKENSKRWNPEIQYTSNYNKSVNVDFTVDTNGVYSEPRPIGTRYLTRNL

SEQ ID NO: 12804 - protein, 735 aa, Artificial Sequence
  source: /note="Description of Artificial Sequence: Synthetic polypeptide"
MAADGYLPDWLEDTLSEGIRQWWKLKPGPPPPKPAERHQDDSRGLVLPGYKYLGPFNGLDKGEPVNEADAAALEHDKAYDRQLDSGDNPYLKYNHADAEFQERLKEDTSFGGNLGRAVFQAKKRVLEPLGLVEEPVKTAPGKKRPVEHSPAEPDSSSGTGKAGQQPARKRLNFGQTGDADSVPDPQPLGQPPAAPTSLGSTTMATGSGAPMADNNEGADGVGNSSGNWHCDSQWLGDRVITTSTRTWALPTYNNHLYKQISSQSGASNDNHYFGYSTPWGYFDFNRFHCHFSPRDWQRLINNNWGFRPKRLNFKLFNIQVKEVTQNDGTTTIANNLTSTVQVFTDSEYQLPYVLGSAHQGCLPPFPADVFMVPQYGYLTLNNGSQAVGRSSFYCLEYFPSQMLRTGNNFTFSYTFEDVPFHSSYAHSQSLDRLMNPLIGQYLYYLNRTQSNSGTLQQSRLLFSQAGPTSMSLQAKNWLPGPCYRQQRLPKQANDNNNSNFPWTAATKYHLNGRDSLVNPGPAMASHKDDEEKFFPMHGTLIFGKQGTNANDADLEHVMITDEEEIRTTNPVATEQYGNVSNNLQNSNTGPTTENVNHQGALPGMVWQDRDVYLQGPIWAKIPHTDGHFHPSPLMGGFGLKHPPPQIMIKNTPVPANPPTNFSAAKFASFITQYSTGQVSVEIEWELQKENSKRWNPEIQYTSNYNKSVNVDFTVDTNGVYSEPRPIGTRYLTRNL

SEQ ID NO: 12805 - protein, 735 aa, Artificial Sequence
  source: /note="Description of Artificial Sequence: Synthetic polypeptide"
MAADGYLPDWLEDTLSEGIRQWWKLKPGPPPPKPAERHQDDSRGLVLPGYKYLGPFNGLDKGEPVNEADAAALEHDKAYDRQLDSGDNPYLKYNHADAEFQERLKEDTSFGGNLGRAVFQAKKRVLEPLGLVEEPVKTAPGKKRPVEHSPAEPDSSSGTGKAGQQPARKRLNFGQTGDADSVPDPQPLGQPPAAPTSLGSTTMATGSGAPMADNNEGADGVGNSSGNWHCDSQWLGDRVITTSTRTWALPTYNNHLYKQISSQSGASNDNHYFGYSTPWGYFDFNRFHCHFSPRDWQRLINNNWGFRPKRLNFKLFNIQVKEVTQNDGTTTIANNLTSTVQVFTDSEYQLPYVLGSAHQGCLPPFPADVFMVPQYGYLTLNNGSQAVGRSSFYCLEYFPSQMLRTGNNFTFSYTFEDVPFHSSYAHSQSLDRLMNPLIDQYLYYLNRTQSNSGTLQQSRLLFSQAGPTSMSLQAKNWLPGPCYRQQRLSKQANDNNNSNFPWTAATKYHLNGRDSLVNPGPAMASHKDDEEKFFPMHGTLIFGKQGTNANDADLEHVMITDEEEIRTTNPVATEQYGNVSNNLQNSNTGPTTENVNHQGALPGMVWQDRDVYLQGPIWAKIPHTDGRFHPSPLMGGFGLKHPPPQIMIKNTPVPANPPTNFSAAKFASFITQYSTGQVSVEIEWELQKENSKRWNPEIQYTSNYNKSVNVDFTVDTNGVYSEPRPIGTRYLTRNL

SEQ ID NO: 12806 - protein, 735 aa, Artificial Sequence
  source: /note="Description of Artificial Sequence: Synthetic polypeptide"
MAADGYLPDWLEDTLSEGIRQWWKLKPGPPPPKPAERHQDDSRGLVLPGYKYLGPFNGLDKGEPVNEADAAALEHDKAYDRQLDSGDNPYLKYNHADAEFQERLKEDTSFGGNLGRAVFQAKKRVLEPLGLVEEPVKTAPGKKRPVEHSPAEPDSSSGTGKAGQQPARKRLNFGQTGDADSVPDPQPLGQPPAAPTSLGSTTMATGSGAPMADNNEGADGVGNSSGNWHCDSQWLGDRVITTSTRTWALPTYNNHLYKQISSQSGASNDNHYFGYSTPWGYFDFNRFHCHFSPRDWQRLINNNWGFRPKRLNFKLFNIQVKEVTQNDGTTTIANNLTSTVQVFTDSEYQLPYVLGSAHQGCLPPFPADVFMVPQYGYLTLNNGSQAVGRSSFYCLEYFPSQMLRTGNNFTFSYTFEDVPFHSSYAHSQSLDRLMNPLIDQYLYYLNRTQSNSGTLQQSRLLFSQAGPTSMSLQAKNWLPGPCYRQQRLSKQANDNNNSNFPWTAATKYHLNGRDSLVNPGPAMASHKDDEEKFFPMHGALIFGKQGTNANDADLEHVMITDEEEIRTTNPVATEQYGNVSNNLQNSNTGPTTENVNHQGALPGMVWQDRDVYLQGPIWAKIPHTDGHFHPSPLMGGFGLKHPPPQIMIKNTPVPANPPTNFSAAKFASFITQYSTGQVSVEIEWELQKENSKRWNPEIQYTSNYNKSVNVDFTVDTNGVYSEPRPIGTRYLTRNL

SEQ ID NO: 12807 - protein, 735 aa, Artificial Sequence
  source: /note="Description of Artificial Sequence: Synthetic polypeptide"
MAADGYLPDWLEDTLSEGIRQWWKLKPGPPPPKPAERHQDDSRGLVLPGYKYLGPFNGLDKGEPVNEADAAALEHDKAYDRQLDSGDNPYLKYNHADAEFQERLKEDTSFGGNLGRAVFQAKKRVLEPLGLVEEPVKTAPGKKRPVEHSPAEPDSSSGTGKAGQQPARKRLNFGQTGDADSVPDPQPLGQPPAAPTSLGSTTMATGSGAPMADNNEGADGVGNSSGNWHCDSQWLGDRVITTSTRTWALPTYNNHLYKQISSQSGASNDNHYFGYSTPWGYFDFNRFHCHFSPRDWQRLINNNWGFRPKRLNFKLFNIQVKEVTQNDGTTTIANNLTSTVQVFTDSEYQLPYVLGSAHQGCLPPFPADVFMVPQYGYLTLNNGSQAVGRSSFYCLEYFPSQMLRTGNNFTFSYTFEDVPFHSSYAHSQSLDRLMNPLIDQYLYYLNRTQSNSGTLQQSRLLFSQAGPTSMSLQAKNWLPGPCYRQQRLSKQANDNNNSNFPWTAATKYHLNGRDSLVNPGPAMASHKDDEEKFFPMHGTLIFGKQGTNANDADLEHAMITDEEEIRTTNPVATEQYGNVSNNLQNSNTGPTTENVNHQGALPGMVWQDRDVYLQGPIWAKIPHTDGHFHPSPLMGGFGLKHPPPQIMIKNTPVPANPPTNFSAAKFASFITQYSTGQVSVEIEWELQKENSKRWNPEIQYTSNYNKSVNVDFTVDTNGVYSEPRPIGTRYLTRNL

SEQ ID NO: 12808 - protein, 735 aa, Artificial Sequence
  source: /note="Description of Artificial Sequence: Synthetic polypeptide"
MAADGYLPDWLEDTLSEGIRQWWKLKPGPPPPKPAERHQDDSRGLVLPGYKYLGPFNGLDKGEPVNEADAAALEHDKAYDRQLDSGDNPYLKYNHADAEFQERLKEDTSFGGNLGRAVFQAKKRVLEPLGLVEEPVKTAPGKKRPVEHSPAEPDSSSGTGKAGQQPARKRLNFGQTGDADSVPDPQPLGQPPAAPTSLGSTTMATGSGAPMADNNEGADGVGNSSGNWHCDSQWLGDRVITTSTRTWALPTYNNHLYKQISSQSGASNDNHYFGYSTPWGYFDFNRFHCHFSPRDWQRLINNNWGFRPKRLNFKLFNIQVKEVTQNDGTTTIANNLTSTVQVFTDSEYQLPYVLGSAHQGCLPPFPADVFMVPQYGYLTLNNGSQAVGRSSFYCLEYFPSQMLRTGNNFTFSYTFEDVPFHSSYAHSQSLDRLMNPLIDQYLYYLNRTQSNSGTLQQSRLLFSQAGPTSMSLQAKNWLPGPCYRQQRLSKQANDNNNSNFPWTAATKYHLNGRDSLVNPGPAMASHKDDEEKFFPMHGTLIFGKQGTNANDADLEHVMITDEEEIRTTNPVATEQYGNVSNNLQNSNTGPTTENVNHQGALPGMVWQDRDVYLQGPIWAKIPHTDGHFHPSPLMGGFGLKHPPPQIMIKNTPVPANPPTNFSAAKFASFITQYSTGQVSVEIEWELQKENSKRWNPEIRYTSNYNKSVNVDFTVDTNGVYSEPRPIGTRYLTRNL

SEQ ID NO: 12809 - protein, 735 aa, Artificial Sequence
  source: /note="Description of Artificial Sequence: Synthetic polypeptide"
MAADGYLPDWLEDTLSEGIRQWWKLKPGPPPPKPAERHQDDSRGLVLPGYKYLGPFNGLDKGEPVNEADAAALEHDKAYDRQLDSGDNPYLKYNHADAEFQERLKEDTSFGGNLGRAVFQAKKRVLEPLGLVEEPVKTAPGKKRPVEHSPAEPDSSSGTGKAGQQPARKRLNFGQTGDADSVPDPQPLGQPPAAPTSLGSTTMATGSGAPMADNNEGADGVGNSSGNWHCDSQWLGDRVITTSTRTWALPTYNNHLYKQISSQSGASNDNHYFGYSTPWGYFDFNRFHCHFSPRDWQRLINNNWGFRPKRLNFKLFNIQVKEVTQNDGTTTIANNLTSTVQVFTDSEYQLPYVLGSAHQGCLPPFPADVFMVPQYGYLTLNNGSQAVGRSSFYCLEYFPSQMLRTGNNFTFSYTFEDVPFHSSYAHSQSLDRLMNPLIDQYLYYLNRTQSNSGTLQQSRLLFSQAGPTSMSLQAKNWLPGPCYRQQRLSKQANDNNNSNFPRTAATKYHLNGRDSLVNPGPAMASHKDDEEKFFPMHGTLIFGKQGTNANDADLEHVMITDEEEIRTTNPVATEQYGNVSNNLQNSNTGPTTENVNHQGALPGMVWQDRDVYLQGPIWAKIPHTDGHFHPSPLMGGFGLKHPPPQIMIKNTPVPANPPTNFSAAKFASFITQYSTGQVSVEIEWELQKENSKRWNPEIQYTSNYNKSVNVDFTVDTNGVYSEPRPIGTRYLTRNL

SEQ ID NO: 12810 - protein, 735 aa, Artificial Sequence
  source: /note="Description of Artificial Sequence: Synthetic polypeptide"
MAADGYLPDWLEDTLSEGIRQWWKLKPGPPPPKPAERHQDDSRGLVLPGYKYLGPFNGLDKGEPVNEADAAALEHDKAYDRQLDSGDNPYLKYNHADAEFQERLKEDTSFGGNLGRAVFQAKKRVLEPLGLVEEPVKTAPGKKRPVEHSPAEPDSSSGTGKAGQQPARKRLNFGQTGDADSVPDPQPLGQPPAAPTSLGSTTMATGSGAPMADNNEGADGVGNSSGNWHCDSQWLGDRVITTSTRTWALPTYNNHLYKQISSQSGASNDNHYFGYSTPWGYFDFNRFHCHFSPRDWQRLINNNWGFRPKRLNFKLFNIQVKEVTQNDGTTTIANNLTSTVQVFTDSEYQLPYVLGSAHQGCLPPFPADVFMVPQYGYLTLNNGSQAVGRSSFYCLEYFPSQMLRTGNNFTFSYTFEDVPFHSSYAHSQSLDRLMNPLIGQYLYYLNRTQSNSGTLQQSRLLFSQAGPTSMSLQAKNWLPGPCYRQQRLSKQANDNNNSNFPWTAATKYHLNGRDSLVNPGPAMASHKDDEEKFFPMHGTLIFGKQGTNANDADLEHVMITDEEEIRTTNPVATEQYGNVSNNLQNSNTGPTTENVNHQGALPGMVWQDRDVYLQGPIWAKIPHTDGHFHPSPLMGGFGLKHPPPQIMIKNTPVPANPPTNFSAAKFASFITQYSTGQVSVEIEWELQKENSKRWNPEIQYTSNYNKSVNVDFTVDTNGVYSEPRPIGTRYLTRNL

SEQ ID NO: 12811 - protein, 735 aa, Artificial Sequence
  source: /note="Description of Artificial Sequence: Synthetic polypeptide"
MAADGYLPDWLEDTLSEGIRQWWKLKPGPPPPKPAERHQDDSRGLVLPGYKYLGPFNGLDKGEPVNEADAAALEHDKAYDRQLDSGDNPYLKYNHADAEFQERLKEDTSFGGNLGRAVFQAKKRVLEPLGLVEEPVKTAPGKKRPVEHSPAEPDSSSGTGKAGQQPARKRLNFGQTGDADSVPDPQPLGQPPAAPTSLGSTTMATGSGAPMADNNEGADGVGNSSGNWHCDSQWLGDRVITTSTRTWALPTYNNHLYKQISSQSGASNDNHYFGYSTPWGYFDFNRFHCHFSPRDWQRLINNNWGFRPKRLNFKLFNIQVKEVTQNDGTTTIANNLTSTVQVFTDSEYQLPYVLGSAHQGCLPPFPADVFMVPQYGYLTLNNGSQAVGRSSFYCLEYFPSQMLRTGNNFTFSYTFEDVPFHSSYAHSQSLDRLMNPLIDQYLYYLNRTQSNSGTLQQSRLLFSQAGPTSMSLQAKNWLPGPCYRQQRLSKQANDNNNSNFPWTAATKYHLNGRDSLVNPGPAMASHKDDEEKFFPMHGTLIFGKQGTNANDADLEHVMITDEEEIRTTNPVATEQYGNVSNNLQNSNTGPTTENVNHQGALPGMVWQDRDVYLQGPIWAKIPHTDGHFHPSPLMGGFGLKHPPPQIMIKNTPVPANPPTNFSAAKFASFITQYSTGQVGVEIEWELQKENSKRWNPEIQYTSNYNKSVNVDFTVDTNGVYSEPRPIGTRYLTRNL

SEQ ID NO: 12812 - protein, 735 aa, Artificial Sequence
  source: /note="Description of Artificial Sequence: Synthetic polypeptide"
MAADGYLPDWLEDTLSEGIRQWWKLKPGPPPPKPAERHQDDSRGLVLPGYKYLGPFNGLDKGEPVNEADAAALEHDKAYDRQLDSGDNPYLKYNHADAEFQERLKEDTSFGGNLGRAVFQAKKRVLEPLGLVEEPVKTAPGKKRPVEHSPAEPDSSSGTGKAGQQPARKRLNFGQTGDADSVPDPQPLGQPPAAPTSLGSTTMATGSGAPMADNNEGADGVGNSSGNWHCDSQWLGDRAITTSTRTWALPTYNNHLYKQISSQSGASNDNHYFGYSTPWGYFDFNRFHCHFSPRDWQRLINNNWGFRPKRLNFKLFNIQVKEVTQNDGTTTIANNLTSTVQVFTDSEYQLPYVLGSAHQGCLPPFPADVFMVPQYGYLTLNNGSQAVGRSSFYCLEYFPSQMLRTGNNFTFSYTFEDVPFHSSYAHSQSLDRLMNPLIDQYLYYLNRTQSNSGTLQQSRLLFSQAGPTSMSLQAKNWLPGPCYRQQRLSKQANDNNNSNFPWTAATKYHLNGRDSLVNPGPAMASHKDDEEKFFPMHGTLIFGKQGTNANDADLEHVMITDEEEIRTTNPVATEQYGNVSNNLQNSNTGPTTENVNHQGALPGMVWQDRDVYLQGPIWAKIPHTDGHFHPSPLMGGFGLKHPPPQIMIKNTPVPANPPTNFSAAKFASFITQYSTGQVSVEIEWELQKENSKRWNPEIQYTSNYNKSVNVDFTVDTNGVYSEPRPIGTRYLTRNL

SEQ ID NO: 12813 - protein, 735 aa, Artificial Sequence
  source: /note="Description of Artificial Sequence: Synthetic polypeptide"
MAADGYLPDWLEDTLSEGIRQWWKLKPGPPPPKPAERHQDDSRGLVLPGYKYLGPFNGLDKGEPVNEADAAALEHDKAYDRQLDSGDNPYLKYNHADAEFQERLKEDTSFGGNLGRAVFQAKKRVLEPLGLVEEPVKTAPGKKRPVEHSPAEPDSSSGTGKAGQQPARKRLNFGQTGDAGSVPDPQPLGQPPAAPTSLGSTTMATGSGAPMADNNEGADGVGNSSGNWHCDSQWLGDRVITTSTRTWALPTYNNHLYKQISSQSGASNDNHYFGYSTPWGYFDFNRFHCHFSPRDWQRLINNNWGFRPKRLNFKLFNIQVKEVTQNDGTTTIANNLTSTVQVFTDSEYQLPYVLGSAHQGCLPPFPADVFMVPQYGYLTLNNGSQAVGRSSFYCLEYFPSQMLRTGNNFTFSYTFEDVPFHSSYAHSQSLDRLMNPLIDQYLYYLNRTQSNSGTLQQSRLLFSQAGPTSMSLQAKNWLPGPCYRQQRLSKQANDNNNSNFPWTAATKYHLNGRDSLVNPGPAMASHKDDEEKFFPMHGTLIFGKQGTNANDADLEHVMITDEEEIRTTNPVATEQYGNVSNNLQNSNTGPTTENVNHQGALPGMVWQDRDVYLQGPIWAKIPHTDGHFHPSPLMGGFGLKHPPPQIMIKNTPVPANPPTNFSAAKFASFITQYSTGQVSVEIEWELQKENSKRWNPEIQYTSNYNKSVNVDFTVDTNGVYSEPRPIGTRYLTRNL

SEQ ID NO: 12814 - protein, 735 aa, Artificial Sequence
  source: /note="Description of Artificial Sequence: Synthetic polypeptide"
MAADGYLPDWLEDTLSEGIRQWWKLKPGPPPPKPAERHQDDSRGLVLPGYKYLGPFNGLDKGEPVNEADAAALEHDKAYDRQLDSGDSPYLKYNHADAEFQERLKEDTSFGGNLGRAVFQAKKRVLEPLGLVEEPVKTAPGKKRPVEHSPAEPDSSSGTGKAGQQPARKRLNFGQTGDADSVPDPQPLGQPPAAPTSLGSTTMATGSGAPMADNNEGADGVGNSSGNWHCDSQWLGDRVITTSTRTWALPTYNNHLYKQISSQSGASNDNHYFGYSTPWGYFDFNRFHCHFSPRDWQRLINNNWGFRPKRLNFKLFNIQVKEVTQNDGTTTIANNLTSTVQVFTDSEYQLPYVLGSAHQGCLPPFPADVFMVPQYGYLTLNNGSQAVGRSSFYCLEYFPSQMLRTGNNFTFSYTFEDVPFHSSYAHSQSLDRLMNPLIDQYLYYLNRTQSNSGTLQQSRLLFSQAGPTSMSLQAKNWLPGPCYRQQRLSKQANDNNNSNFPWTAATKYHLNGRDSLVNPGPAMASHKDDEEKFFPMHGTLIFGKQGTNANDADLEHVMITDEEEIRTTNPVATEQYGNVSNNLQNSNTGPTTENVNHQGALPGMVWQDRDVYLQGPIWAKIPHTDGHFHPSPLMGGFGLKHPPPQIMIKNTPVPANPPTNFSAAKFASFITQYSTGQVSVEIEWELQKENSKRWNPEIQYTSNYNKSVNVDFTVDTNGVYSEPRPIGTRYLTRNL

SEQ ID NO: 12815 - protein, 735 aa, Artificial Sequence
  source: /note="Description of Artificial Sequence: Synthetic polypeptide"
MAADGYLPDWLEDTLSEGIRQWWKLKPGPPPPKPAERHQDDSRGLVLPGYKYLGPFNGLDKGEPVNEADAAALEHDKAYDRQLDSGDNPYLKYNHADAEFQERLKEDTSFGGNLGRAVFQAKKRVLEPLGLVEEPVKTAPGKKRPVEHSPAEPDSSSGTGKAGQQPARKRLNFGQTGDADSVPDPQPLGQPPAAPTSLGSTTMATGSGAPMADNNEGADGVGNSSGNWHCDSQWLGDRVITTSTRTWALPTYNNHLYKQISSQSGASNDNHYFGYSTPWGYFDFNRFHCHFSPRDWQRLINNNWGFRPKRLNFKLFNIQVKEVTQNDGTTTIANNLTSTVQVFTDSEYQLPYVLGSAHQGCLPPFPADVFMVPQYGYLTLNNGSQAVGRSSFYCLEYFPSQMLRTGNNFTFSYTFEDVPFHSSYAHSQSLDRLMNPLIDQYLYYLNRTQSNSGTLQQSRLLFSQAGPTSMSLQAKNWLPGPCYRQQRLSKQANDNNNSNFPWTAATKYHLNGRDSLVNPGPAMASHKDDEEKFFPMHGTLIFGKQGTNANDADLEHVMITDEEEIRTTNPVATEQYGNVSNNLQNSNTGPTTENVNHQGALPGMVWQDRDVYLQGPIWAKIPHTDGHFHPSPLMGGFGLKHPPPQIMIKNTPVPANPPTNFSAAKFASFITQYSTGQVSVEIEWELQKENSKRWNPEIQYTSNYNKSVNVDFTVDTNGVYSEPRPIGTRYLTRNP

SEQ ID NO: 12816 - protein, 735 aa, Artificial Sequence
  source: /note="Description of Artificial Sequence: Synthetic polypeptide"
MAADGYLPDWLEDTLSEGIRQWWKLKPGPPPPKPAERHQDDSRGLVLPGYKYLGPFNGLDKGEPVNEADAAALEHDKAYDRQLDSGDNPYLKYNHADAEFQERLKEDTSFGGNLGRAVFQAKKRVLEPLGLVEEPVKTAPGKKRPVEHSPAEPDSSSGTGKAGQQPARKRLNFGQTGDADSVPDPQPLGQPPAAPTSLGSTTMATGSGAPMADNNEGADGVGNSSGNWHCDSQWLGDRVITTSTRTWALPTYNNHLYKQISSQSGASNDNHYFGYSTPWGYFDFNRFHCHFSPRDWQRLINNNWGFRPKRLNFKLFNIQVKEVTQNDGTTTIANNLTSTVQVFTDSEYQLPYVLGSAHQGCLPPFPADVFMVPQYGYLTLNNGSQAVGRSSFYCLEYFPSQMLRTGNNFTFSYTFEDVPFHSSYAHSQSLDRLMNPLIDQYLYYLNRTQSNSGTLQQSRLLFSQAGPTSMSLQAKNWLPGPCYRQQRPSKQANDNNNSNFPWTAATKYHLNGRDSLVNPGPAMASHKDDEEKFFPMHGTLIFGKQGTNANDADLEHVMITDEEEIRTTNPVATEQYGNVSNNLQNSNTGPTTENVNHQGALPGMVWQDRDVYLQGPIWAKIPHTDGHFHPSPLMGGFGLKHPPPQIMIKNTPVPANPPTNFSAAKFASFITQYSTGQVSVEIEWELQKENSKRWNPEIQYTSNYNKSVNVDFTVDTNGVYSEPRPIGTRYLTRNL

SEQ ID NO: 12817 - protein, 735 aa, Artificial Sequence
  source: /note="Description of Artificial Sequence: Synthetic polypeptide"
MAADGYLPDWLEDTLSEGIRQWWKLKPGPPPPKPAERHQDDSRGLVLPGYKYLGPFNGLDKGEPVNEADAAALEHDKAYDRQLDSGDNPYLKYNHADAEFQERLKEDTSFGGNLGRAVFQAKKRVLEPLGLVEEPVKTAPGKKRPVEHSPAEPDSSSGTGKAGQQPARKRLNFSQTGDADSVPDPQPLGQPPAAPTSLGSTTMATGSGAPMADNNEGADGVGNSSGNWHCDSQWLGDRVITTSTRTWALPTYNNHLYKQISSQSGASNDNHYFGYSTPWGYFDFNRFHCHFSPRDWQRLINNNWGFRPKRLNFKLFNIQVKEVTQNDGTTTIANNLTSTVQVFTDSEYQLPYVLGSAHQGCLPPFPADVFMVPQYGYLTLNNGSQAVGRSSFYCLEYFPSQMLRTGNNFTFSYTFEDVPFHSSYAHSQSLDRLMNPLIDQYLYYLNRTQSNSGTLQQSRLLFSQAGPTSMSLQAKNWLPGPCYRQQRLSKQANDNNNSNFPWTAATKYHLNGRDSLVNPGPAMASHKDDEEKFFPMHGTLIFGKQGTNANDADLEHVMITDEEEIRTTNPVATEQYGNVSNNLQNSNTGPTTENVNHQGALPGMVWQDRDVYLQGPIWAKIPHTDGHFHPSPLMGGFGLKHPPPQIMIKNTPVPANPPTNFSAAKFASFITQYSTGQVSVEIEWELQKENSKRWNPEIQYTSNYNKSVNVDFTVDTNGVYSEPRPIGTRYLTRNL

SEQ ID NO: 12818 - protein, 735 aa, Artificial Sequence
  source: /note="Description of Artificial Sequence: Synthetic polypeptide"
MAADGYLPDWLEDTLSEGIRQWWKLKPGPPPPKPAERHQDDSRGLVLPGYKYLGPFNGLDKGEPVNEADAAALEHDKAYDRQLDSGDNPYLKYNHADAEFQERLKEDTSFGGNLGRAVFQAKKRVLEPLGLVEEPVKTAPGKKRPVEHSPAEPDSSSGTGKAGQQPARKRLNFGQTGDADSVPDPQPLGQPPAAPTSLGSTTMATGSGAPMADNNEGADGVGNSSGNWHCDSQWLGDRVITTSTRTWALPTYNNHLYKQISSQSGASNDNHYFGYSTPWGYFDFNRFHCHFSPRDWQRLINNNWGFRPKRLNFKLFNIQVKEVTQNDGTTTIANNLTSTVQVFTDSEYQLPYVLGSAHQGCLPPFPADVFMVPQYGYLTLNNGSQAVGRSSFYCLEYFPSQMLRTGNNFTFSYTFEDVPFHSSYAHSQSLDRLMNPLIDQYLYYLNRTQSNSGTLQQSRLLFSQAGPTSMSLQAKNWLPGPCYRQQRLSKQANDNNNSNFPWTAATKYHLNGRDSLVNPGPAMASHKDDEEKFFPMHGTLIFGKQGTNANDADLEHVMITDEEEIRTTNPVATEQYGNVSNNLQNSNTGPTTENVNHQGALPGMVWQDRDVYLQGPIWAKIPHTDGHFHPSPLMGGFGLKHPPPQIMIKNTPVPANPPTNFSAAKFASFITQYSTGQVSVEIEWEPQKENSKRWNPEIQYTSNYNKSVNVDFTVDTNGVYSEPRPIGTRYLTRNL

SEQ ID NO: 12819 - protein, 735 aa, Artificial Sequence
  source: /note="Description of Artificial Sequence: Synthetic polypeptide"
MAADGYLPDWLEDTLSEGIRQWWKLKPGPPPPKPAERHQDDSRGLVLPGYKYLGPFNGLDKGEPVNEADAAALEHDKAYDRQLDSGDNPYLKYNHADAEFQERLKEDTSFGGNLGRAVFQAKKRVLEPLGLVEEPVKTAPGKKRPVEHSPAEPDSSSGTGKAGQQPARKRLNFGQTGDADSVPDPQPLGQPPAAPTSLGSTTMATGSGAPMADNNEGADGVGNSSGNWHCDSQWLGDRVITTSTRTWALPTYNNHLYKQISSQSGASNDNHYFGYSTPWGYFDFNRFHCHFSPRDWQRLINNNWGFRPKRPNFKLFNIQVKEVTQNDGTTTIANNLTSTVQVFTDSEYQLPYVLGSAHQGCLPPFPADVFMVPQYGYLTLNNGSQAVGRSSFYCLEYFPSQMLRTGNNFTFSYTFEDVPFHSSYAHSQSLDRLMNPLIDQYLYYLNRTQSNSGTLQQSRLLFSQAGPTSMSLQAKNWLPGPCYRQQRLSKQANDNNNSNFPWTAATKYHLNGRDSLVNPGPAMASHKDDEEKFFPMHGTLIFGKQGTNANDADLEHVMITDEEEIRTTNPVATEQYGNVSNNLQNSNTGPTTENVNHQGALPGMVWQDRDVYLQGPIWAKIPHTDGHFHPSPLMGGFGLKHPPPQIMIKNTPVPANPPTNFSAAKFASFITQYSTGQVSVEIEWELQKENSKRWNPEIQYTSNYNKSVNVDFTVDTNGVYSEPRPIGTRYLTRNL

SEQ ID NO: 12820 - protein, 735 aa, Artificial Sequence
  source: /note="Description of Artificial Sequence: Synthetic polypeptide"
MAADGYLPDWLEDTLSEGIRQWWKLKPGPPPPKPAERHQDDSRGLVLPGYKYLGPFNGLDKGEPVNEADAAALEHDKAYDRQLDSGDNPYLKYNHADAEFQERLKEDTSFGGNLGRAVFQAKKRVLEPLGLVEEPVKTAPGKKRPVEHSPAEPDSSSGTGKAGQQPARKRLNFGQTGDADSVPDPQPLGQPPAAPTSLGSTTMATGSGAPMADNNEGADGVGNSSGNWHCDSQWLGDRVITTSTRTWALPTYNNHLYKQISSQSGASNDNHYFGYSTPWGYFDFNRFHCHFSPRDWQRLINNNWGFRPKRLNFKLFNIQVKEVTQNDGTTTIANNLTSTVQVFTDSEYQLPYVLGSAHQGCLPPFPADVFMVPQYGYLTLNNGSQAVGRSSFYCLEYFPSQMLRTGNNFTFSYTFEDVPFHSSYAHSQSLDRLMNPLIDQYLYYLNRTQSNSGTLQQSRLLFSQAGPTSMSLQAKNWLPGPCYRQQRLSKQANDNNNSNFPWTAATKYHLNGRDSLVNPGPAMASHKDDEEKFFPMHGTLIFGKQGTNANDADLEHVVITDEEEIRTTNPVATEQYGNVSNNLQNSNTGPTTENVNHQGALPGMVWQDRDVYLQGPIWAKIPHTDGHFHPSPLMGGFGLKHPPPQIMIKNTPVPANPPTNFSAAKFASFITQYSTGQVSVEIEWELQKENSKRWNPEIQYTSNYNKSVNVDFTVDTNGVYSEPRPIGTRYLTRNL

SEQ ID NO: 12821 - protein, 735 aa, Artificial Sequence
  source: /note="Description of Artificial Sequence: Synthetic polypeptide"
MAADGYLPDWLEDTLSEGIRQWWKLKPGPPPPKPAERHQDDSRGLVLPGYKYLGPFNGLDKGEPVNEADAAALEHDKAYDRQLDSGDNPYLKYNHADAEFQERLKEDTSFGGNLGRAVFQAKKRVLEPLGLVEEPVKTAPGKKRPVEHSPAEPDSSSGTGKAGQQPARKRLNFGQTGDADSVPDPQPLGQPPAAPTSLGSTTMATGSGAPMADNNEGADGVGNSSGNWHCDSQWLGDRVITTSTRTWALPTYNNHLYKQISSQSGASNDNHYFGYSTPWGYFDFNRFHCHFSPRDWQRLINNNWGFRPKRLNFKLFNIQVKEVTQNDGTTTIANNLTSTVQVFTDSEYQLPYVLGSAHQGCLPPFPADVFMVPQYGYLTLNNGSQAVGRSSFYCLEYFPSQMLRTGNNFTFSYTFEDVPFHSSYAHSQSLDRLMNPLIDQYLYYLNRTQSNSGTLQQSRLLFSQAGPTSMSLQAKNWLPGPCYRQQRLSKQANDNNNSNFPWTAATKYHLNGRDSLVNPGPAMASHKDDEEKFFPMHGTLIFGKQGTNANDADLEHVMITDEEEIRTTNPVATEQYGNVSNNLQNSNTGPTTENVNHQGALPGMVWRDRDVYLQGPIWAKIPHTDGHFHPSPLMGGFGLKHPPPQIMIKNTPVPANPPTNFSAAKFASFITQYSTGQVSVEIEWELQKENSKRWNPEIQYTSNYNKSVNVDFTVDTNGVYSEPRPIGTRYLTRNL

SEQ ID NO: 12822 - protein, 735 aa, Artificial Sequence
  source: /note="Description of Artificial Sequence: Synthetic polypeptide"
MAADGYLPDWLEDTLSEGIRQWWKLKPGPPPPKPAERHQDDSRGLVLPGYKYLGPFNGLDKGEPVNEADAAALEHDKAYDRQLDSGDNPYLKYNHADAEFQERLKEDTSFGGNLGRAVFQAKKRVLEPLGLVEEPVKTAPGKKRPVEHSPAEPDSSSGTGKAGQQPARKRLNFGQTGGADSVPDPQPLGQPPAAPTSLGSTTMATGSGAPMADNNEGADGVGNSSGNWHCDSQWLGDRVITTSTRTWALPTYNNHLYKQISSQSGASNDNHYFGYSTPWGYFDFNRFHCHFSPRDWQRLINNNWGFRPKRLNFKLFNIQVKEVTQNDGTTTIANNLTSTVQVFTDSEYQLPYVLGSAHQGCLPPFPADVFMVPQYGYLTLNNGSQAVGRSSFYCLEYFPSQMLRTGNNFTFSYTFEDVPFHSSYAHSQSLDRLMNPLIDQYLYYLNRTQSNSGTLQQSRLLFSQAGPTSMSLQAKNWLPGPCYRQQRLSKQANDNNNSNFPWTAATKYHLNGRDSLVNPGPAMASHKDDEEKFFPMHGTLIFGKQGTNANDADLEHVMITDEEEIRTTNPVATEQYGNVSNNLQNSNTGPTTENVNHQGALPGMVWQDRDVYLQGPIWAKIPHTDGHFHPSPLMGGFGLKHPPPQIMIKNTPVPANPPTNFSAAKFASFITQYSTGQVSVEIEWELQKENSKRWNPEIQYTSNYNKSVNVDFTVDTNGVYSEPRPIGTRYLTRNL

SEQ ID NO: 12823 - protein, 735 aa, Artificial Sequence
  source: /note="Description of Artificial Sequence: Synthetic polypeptide"
MAADGYLPDWLEDTLSEGIRQWWKLKPGPPPPKPAERHQDDSRGLVLPGYKYLGPFNGLDKGEPVNEADAAALEHDKAYDRQLDSGDNPYLKYNHADAEFQERLKEDTSFGGNLGRAVFQAKKRVLEPLGLVEEPVKTAPGKKRPVEHSPAEPDSSSGTGKAGQQPARKRLNFGQTGDADSVPDPQPLGQPPAAPTSLGSTTMATGSGAPMADNNEGTDGVGNSSGNWHCDSQWLGDRVITTSTRTWALPTYNNHLYKQISSQSGASNDNHYFGYSTPWGYFDFNRFHCHFSPRDWQRLINNNWGFRPKRLNFKLFNIQVKEVTQNDGTTTIANNLTSTVQVFTDSEYQLPYVLGSAHQGCLPPFPADVFMVPQYGYLTLNNGSQAVGRSSFYCLEYFPSQMLRTGNNFTFSYTFEDVPFHSSYAHSQSLDRLMNPLIDQYLYYLNRTQSNSGTLQQSRLLFSQAGPTSMSLQAKNWLPGPCYRQQRLSKQANDNNNSNFPWTAATKYHLNGRDSLVNPGPAMASHKDDEEKFFPMHGTLIFGKQGTNANDADLEHVMITDEEEIRTTNPVATEQYGNVSNNLQNSNTGPTTENVNHQGALPGMVWQDRDVYLQGPIWAKIPHTDGHFHPSPLMGGFGLKHPPPQIMIKNTPVPANPPTNFSAAKFASFITQYSTGQVSVEIEWELQKENSKRWNPEIQYTSNYNKSVNVDFTVDTNGVYSEPRPIGTRYLTRNL

SEQ ID NO: 12824 - protein, 735 aa, Artificial Sequence
  source: /note="Description of Artificial Sequence: Synthetic polypeptide"
MAADGYLPDWLEDTLSEGIRQWWKLKPGPPPPKPAERHQDDSRGLVLPGYKYLGPFNGLDKGEPVNEADAAALEHDKAYDRQLDSGDNPYPKYNHADAEFQERLKEDTSFGGNLGRAVFQAKKRVLEPLGLVEEPVKTAPGKKRPVEHSPAEPDSSSGTGKAGQQPARKRLNFGQTGDADSVPDPQPLGQPPAAPTSLGSTTMATGSGAPMADNNEGADGVGNSSGNWHCDSQWLGDRVITTSTRTWALPTYNNHLYKQISSQSGASNDNHYFGYSTPWGYFDFNRFHCHFSPRDWQRLINNNWGFRPKRLNFKLFNIQVKEVTQNDGTTTIANNLTSTVQVFTDSEYQLPYVLGSAHQGCLPPFPADVFMVPQYGYLTLNNGSQAVGRSSFYCLEYFPSQMLRTGNNFTFSYTFEDVPFHSSYAHSQSLDRLMNPLIDQYLYYLNRTQSNSGTLQQSRLLFSQAGPTSMSLQAKNWLPGPCYRQQRLSKQANDNNNSNFPWTAATKYHLNGRDSLVNPGPAMASHKDDEEKFFPMHGTLIFGKQGTNANDADLEHVMITDEEEIRTTNPVATEQYGNVSNNLQNSNTGPTTENVNHQGALPGMVWQDRDVYLQGPIWAKIPHTDGHFHPSPLMGGFGLKHPPPQIMIKNTPVPANPPTNFSAAKFASFITQYSTGQVSVEIEWELQKENSKRWNPEIQYTSNYNKSVNVDFTVDTNGVYSEPRPIGTRYLTRNL

SEQ ID NO: 12825 - protein, 735 aa, Artificial Sequence
  source: /note="Description of Artificial Sequence: Synthetic polypeptide"
MAADGYLPDWLEDTLSEGIRQWWKLKPGPPPPKPAERHQDDSRGLVLPGYKYLGPFNGLDKGEPVNEADAAALEHDKAYDRQLDSGDNPYLKYNHADAEFQERLKEDTSFGGNLGRAVFQAKKRVLEPLGLVEEPVKTAPGKKRPVEHSPAEPDSSSGTGKAGQQPARKRLNFGQTGDADSVPDPQPLGQPPAAPTSLGSTTMATGSGAPMADNNEGADGVGNSSGNWHCDSQWLGDRVITTSTRTWALPTYNNHLYKQISSQSGASNDNHYFGYSTPWGYFDFNRFHCHFSPRDWQRLINNNWGFRPKRLNFKLFNIQVKEVTQNDGTTTIANNLTSTVQVFTDSEYQLPYVLGSAHQGCLPPFPADVFMVPQYGYLTLNNGSQAVGRSSFYCLEYFPSQMLRTGNNFTFSYTFEDVPFHSSYAHSQSLDRLMNPLIDQYLYYLNRTQSNSGTLQQSRLLFSQAGPTSMSLQAKNWLPGPCYRQQRLSKQANDNNNSNFPWTAATKYHLNGRDSLVNPGPAMASHKDDEEKFFPMHGTLIFGKQGTNANDADLEHVMITDEEEIRATNPVATEQYGNVSNNLQNSNTGPTTENVNHQGALPGMVWQDRDVYLQGPIWAKIPHTDGHFHPSPLMGGFGLKHPPPQIMIKNTPVPANPPTNFSAAKFASFITQYSTGQVSVEIEWELQKENSKRWNPEIQYTSNYNKSVNVDFTVDTNGVYSEPRPIGTRYLTRNL

SEQ ID NO: 12826 - protein, 735 aa, Artificial Sequence
  source: /note="Description of Artificial Sequence: Synthetic polypeptide"
MAADGYLPDWLEDTLSEGIRQWWKLKPGPPPPKPAERHQDDSRGLVLPGYKYLGPFNGLDKGEPVNEADAAALEHDKAYDRQLDSGDNPYLKYNHADAEFQERLKEDTSFGGNLGRAVFQAKKRVLEPLGLVEEPVKTAPGKKRPVEHSPAEPDSSSGTGKAGQQPARKRLNFGQTGDADSVPDPQPLGQPPAAPTSLGSTTMATGSGAPMADNNEGADGVGNSSGNWHCDSQWLGDRVITTSTRTWALPTYNNHLYKQISSQSGASNDNHYFGYSTPWGYFDFNRFHCRFSPRDWQRLINNNWGFRPKRLNFKLFNIQVKEVTQNDGTTTIANNLTSTVQVFTDSEYQLPYVLGSAHQGCLPPFPADVFMVPQYGYLTLNNGSQAVGRSSFYCLEYFPSQMLRTGNNFTFSYTFEDVPFHSSYAHSQSLDRLMNPLIDQYLYYLNRTQSNSGTLQQSRLLFSQAGPTSMSLQAKNWLPGPCYRQQRLSKQANDNNNSNFPWTAATKYHLNGRDSLVNPGPAMASHKDDEEKFFPMHGTLIFGKQGTNANDADLEHVMITDEEEIRTTNPVATEQYGNVSNNLQNSNTGPTTENVNHQGALPGMVWQDRDVYLQGPIWAKIPHTDGHFHPSPLMGGFGLKHPPPQIMIKNTPVPANPPTNFSAAKFASFITQYSTGQVSVEIEWELQKENSKRWNPEIQYTSNYNKSVNVDFTVDTNGVYSEPRPIGTRYLTRNL

SEQ ID NO: 12827 - protein, 735 aa, Artificial Sequence
  source: /note="Description of Artificial Sequence: Synthetic polypeptide"
MAADGYLPDWLEDTLSEGIRQWWKLKPGPPPPKPAERHQDDSRGLVLPGYKYLGPFNGLDKGEPVNEADAAALEHDKAYDRQLDSGDNPYLKYNHADAEFQERLKEDTSFGGNLGRAVFQAKKRVLEPLGLVEEPVKTAPGKKRPVEHSPAEPDSSSGTGKAGQQPARKRLNFGQTGDADSVPDPQPLGQPPAAPTSLGSTTMATGSGAPMADNNEGADGVGNSSGNWHCDSQWLGDRVITTSTRTWALPTYNNHLYKQISSQSGASNDNHYFGYSTPWGYFDFNRFHCHFSPRDWQRLINNNWGFRPKRLNFKLFNIQVKEVTQNDGTTTIANNLTSTVQVFTDSEYQLPYVLGSAHQGCLPPFPADVFMVPQYGYLTLNNGSQAVGRSSFYCLEYFPSQMLRTGNNFTFSYTFEDVPFRSSYAHSQSLDRLMNPLIDQYLYYLNRTQSNSGTLQQSRLLFSQAGPTSMSLQAKNWLPGPCYRQQRLSKQANDNNNSNFPWTAATKYHLNGRDSLVNPGPAMASHKDDEEKFFPMHGTLIFGKQGTNANDADLEHVMITDEEEIRTTNPVATEQYGNVSNNLQNSNTGPTTENVNHQGALPGMVWQDRDVYLQGPIWAKIPHTDGHFHPSPLMGGFGLKHPPPQIMIKNTPVPANPPTNFSAAKFASFITQYSTGQVSVEIEWELQKENSKRWNPEIQYTSNYNKSVNVDFTVDTNGVYSEPRPIGTRYLTRNL

SEQ ID NO: 12828 - protein, 735 aa, Artificial Sequence
  source: /note="Description of Artificial Sequence: Synthetic polypeptide"
MAADGYLPDWLEDTLSEGIRQWWKLKPGPPPPKPAERHQDDSRGLVLPGYKYLGPFNGLDKGEPVNEADAAALEHDKAYDRQLDSGDNPYLKYNHADAEFQERLKEDTSFGGNLGRAVFQAKKRVLEPLGLVEEPVKTAPGKKRPVEHSPAEPDSSSGTGKAGQQPARKRLNFGQTGDADSVPDPQPLGQPPAAPTSLGSTTMATGSGAPMADNNEGADGVGNSSGNWHCDSQWLGDRVITTSTRTWALPTYSNHLYKQISSQSGASNDNHYFGYSTPWGYFDFNRFHCHFSPRDWQRLINNNWGFRPKRLNFKLFNIQVKEVTQNDGTTTIANNLTSTVQVFTDSEYQLPYVLGSAHQGCLPPFPADVFMVPQYGYLTLNNGSQAVGRSSFYCLEYFPSQMLRTGNNFTFSYTFEDVPFHSSYAHSQSLDRLMNPLIDQYLYYLNRTQSNSGTLQQSRLLFSQAGPTSMSLQAKNWLPGPCYRQQRLSKQANDNNNSNFPWTAATKYHLNGRDSLVNPGPAMASHKDDEEKFFPMHGTLIFGKQGTNANDADLEHVMITDEEEIRTTNPVATEQYGNVSNNLQNSNTGPTTENVNHQGALPGMVWQDRDVYLQGPIWAKIPHTDGHFHPSPLMGGFGLKHPPPQIMIKNTPVPANPPTNFSAAKFASFITQYSTGQVSVEIEWELQKENSKRWNPEIQYTSNYNKSVNVDFTVDTNGVYSEPRPIGTRYLTRNL

SEQ ID NO: 12829 - protein, 735 aa, Artificial Sequence
  source: /note="Description of Artificial Sequence: Synthetic polypeptide"
MAADGYLPDWLEDTLSEGIRQWWKLKPGPPPPKPAERHQDDSRGLVLPGYKYLGPFNGLDKGEPVNEADAAALEHDKAYDRQLDSGDNPYLKYNHADAEFQERLKEDTSFGGNLGRAVFQAKKRVLEPLGLVEEPVKTAPGKKRPVEHSPAEPDSSSGTGKAGQQPARKRLNFGQTGDADSVPDPQPLGQPPAAPTSLGSTTMATGSGAPMADNNEGADGVGNSSGNWHCDSQWLGDRVITTSTRTWALPTYNNHLYKQISSQSGASNDNHYFGYSTPWGYFDFNRFHCHFSPRDWQRLINNNWGFRPKRLNFKPFNIQVKEVTQNDGTTTIANNLTSTVQVFTDSEYQLPYVLGSAHQGCLPPFPADVFMVPQYGYLTLNNGSQAVGRSSFYCLEYFPSQMLRTGNNFTFSYTFEDVPFHSSYAHSQSLDRLMNPLIDQYLYYLNRTQSNSGTLQQSRLLFSQAGPTSMSLQAKNWLPGPCYRQQRLSKQANDNNNSNFPWTAATKYHLNGRDSLVNPGPAMASHKDDEEKFFPMHGTLIFGKQGTNANDADLEHVMITDEEEIRTTNPVATEQYGNVSNNLQNSNTGPTTENVNHQGALPGMVWQDRDVYLQGPIWAKIPHTDGHFHPSPLMGGFGLKHPPPQIMIKNTPVPANPPTNFSAAKFASFITQYSTGQVSVEIEWELQKENSKRWNPEIQYTSNYNKSVNVDFTVDTNGVYSEPRPIGTRYLTRNL

SEQ ID NO: 12830 - protein, 735 aa, Artificial Sequence
  source: /note="Description of Artificial Sequence: Synthetic polypeptide"
MAADGYLPDWLEDTLSEGIRQWWKLKPGPPPPKPAERHQDDSRGLVLPGYKYLGPFNGLDKGEPVNEADAAALEHDKAYDRQLDSGDNPYLKYNHADAEFQERLKEDTSFGGNLGRAVFQAKKRVLEPLGLVEEPVKTAPGKKRPVEHSPAEPDSSSGTGKAGQQPARKRLNFGQTGDADSVPDPQPLGQPPAAPTSLGSTTMATGSGAPMADNNEGADGVGNSSGNWHCDSQWLGDRVITTSTRTWALPTYNNHLYKQISSQSGASNGNHYFGYSTPWGYFDFNRFHCHFSPRDWQRLINNNWGFRPKRLNFKLFNIQVKEVTQNDGTTTIANNLTSTVQVFTDSEYQLPYVLGSAHQGCLPPFPADVFMVPQYGYLTLNNGSQAVGRSSFYCLEYFPSQMLRTGNNFTFSYTFEDVPFHSSYAHSQSLDRLMNPLIDQYLYYLNRTQSNSGTLQQSRLLFSQAGPTSMSLQAKNWLPGPCYRQQRLSKQANDNNNSNFPWTAATKYHLNGRDSLVNPGPAMASHKDDEEKFFPMHGTLIFGKQGTNANDADLEHVMITDEEEIRTTNPVATEQYGNVSNNLQNSNTGPTTENVNHQGALPGMVWQDRDVYLQGPIWAKIPHTDGHFHPSPLMGGFGLKHPPPQIMIKNTPVPANPPTNFSAAKFASFITQYSTGQVSVEIEWELQKENSKRWNPEIQYTSNYNKSVNVDFTVDTNGVYSEPRPIGTRYLTRNL

SEQ ID NO: 12831 - protein, 735 aa, Artificial Sequence
  source: /note="Description of Artificial Sequence: Synthetic polypeptide"
MAADGYLPDWLEDTLSEGIRQWWKLKPGPPPPKPAERHQDDSRGLVLPGYKYLGPFNGLDKGEPVNEADAAALEHDKAYDRQLDSGDNPYLKYNHADAEFQERLKEDTSFGGNLGRAVFQAKKRVLEPLGLVEEPVKTAPGKKRPVEHSPAEPDSSSGTGKAGQQPARKRLNFGQTGDADSVPDPQPLGQPPAAPTSLGSTTMATGSGAPMADNNEGADGVGNSSGNWHCDSQWLGDRVITTSTRTWALPTYNNHLYKQISSQSGASNDNHYFGYSTPWGYFDFNRFHCHFSPRDWQRLINNNWGFRPKRLNFKLFNIQVKEVTQNDGTTTIANNLTSTVQVFTDSEYQLPYVLGSAHQGCLPPFPADVFMVPQYGYLTLNNGSQAVGRSSFYCLEYFPSQMLRTGNNFTFSYTFEDVPFHSSYAHSQSLDRLMNPLIDQYLYYLNRTQSNSGTLQQSRLLFSQAGPTSMSLQAKNWLPGPCYRQQRLSKQANDNNNSNFPWTAATKYHLNGRDSLVNPGPAMASHKDDEEKFFPMHGTLIFGKQGTNANDADLEHVMITDEEEIRTANPVATEQYGNVSNNLQNSNTGPTTENVNHQGALPGMVWQDRDVYLQGPIWAKIPHTDGHFHPSPLMGGFGLKHPPPQIMIKNTPVPANPPTNFSAAKFASFITQYSTGQVSVEIEWELQKENSKRWNPEIQYTSNYNKSVNVDFTVDTNGVYSEPRPIGTRYLTRNL

SEQ ID NO: 12832 - protein, 735 aa, Artificial Sequence
  source: /note="Description of Artificial Sequence: Synthetic polypeptide"
MAADGYLPDWLEDTLSEGIRQWWKLKPGPPPPKPAERHQDDSRGLVLPGYKYLGPFNGLDKGEPVNEADAAALEHDKAYDRQLDSGDNPYLKYNHADAEFQERLKEDTSFGGNLGRAVFQAKKRVLEPLGLVEEPVKTAPGKKRPVEHSPAEPDSSSGTGKAGQQPARKRLNFGQTGDADSVPDPQPLGQPPAAPTSLGSTTMATGSGAPMADNNEGADGVGNSSGNWHCDSQWLGDRVITTSTRTWALPTYNNHLYKQISSQSGASNDNHYFGYSTPWGYFDFNRFHCHFSPRDWQRLINNNWGFRPKRLNFKLFNIQVKEVTQNDGTTTIANNLTSTVQVFTDSEYQLPYVLGSAHQGCLPPFPADVFMVPQYGYLTLNNGSQAVGRSSFYCLEYFPSQMLRTGNNFTFSYTFEGVPFHSSYAHSQSLDRLMNPLIDQYLYYLNRTQSNSGTLQQSRLLFSQAGPTSMSLQAKNWLPGPCYRQQRLSKQANDNNNSNFPWTAATKYHLNGRDSLVNPGPAMASHKDDEEKFFPMHGTLIFGKQGTNANDADLEHVMITDEEEIRTTNPVATEQYGNVSNNLQNSNTGPTTENVNHQGALPGMVWQDRDVYLQGPIWAKIPHTDGHFHPSPLMGGFGLKHPPPQIMIKNTPVPANPPTNFSAAKFASFITQYSTGQVSVEIEWELQKENSKRWNPEIQYTSNYNKSVNVDFTVDTNGVYSEPRPIGTRYLTRNL

SEQ ID NO: 12833 - protein, 735 aa, Artificial Sequence
  source: /note="Description of Artificial Sequence: Synthetic polypeptide"
MAADGYLPDWLEDTLSEGIRQWWKLKPGPPPPKPAERHQDDSRGLVLPGYKYLGPFNGLDKGEPVNEADAAALEHDKAYDRQLDSGDNPYLKYNHADAEFQERLKEDTSFGGNLGRAVFQAKKRVLEPLGLVEEPVKTAPGKKRPVEHSPAEPDSSSGTGKAGQQPARKRLNFGQTGDADSVPDPQPLGQPPAAPTSLGSTTMATGSGAPMADNNEGADGVGNSSGNWHCDSQWLGDRVITTSTRTWALPTYNNHLYKQISSQSGASNDNHYFGYSTPWGYFDFNRFHCHFSPRDWQRLINNNWGFRPKRLNFKLFNIQVKEVTQNDGTTTIANNLTSTVQVFTDSEYQLPYVLGSAHQGCLPPFPADVFMVPQYGYLTLNNGSQAVGRSSFYCLEYFPSQMLRTGNNFTFSYTFEDVPFHSSYAHSQSLDRLMNPLIDQYLYYLNRTQSNSGTLQQSRLLFSQAGPTSMSLQAKNWLPGPCYRQQRLSKQANDNNNSNFPWTAATKYHLNGRDSLVNPGPAMASHKDDEEKFFPMHGTLIFGKQGTNANDADLEHVMITDEEEIRTTNPVATEQYGNVSNNLQNSNTGPTTENVNHQGALPGMVWQDRDVYLQGPIWAKIPHTDGHFHPSPLMGGFGLKHPPPQIMIKNTPVPANPPTNFSAAKFASFITQYSTGQVSVEIEWELQKENSKRWNPEIQYTSNYSKSVNVDFTVDTNGVYSEPRPIGTRYLTRNL

SEQ ID NO: 12834 - protein, 735 aa, Artificial Sequence
  source: /note="Description of Artificial Sequence: Synthetic polypeptide"
MAADGYLPDWLEDTLSEGIRQWWRLKPGPPPPKPAERHQDDSRGLVLPGYKYLGPFNGLDKGEPVNEADAAALEHDKAYDRQLDSGDNPYLKYNHADAEFQERLKEDTSFGGNLGRAVFQAKKRVLEPLGLVEEPVKTAPGKKRPVEHSPAEPDSSSGTGKAGQQPARKRLNFGQTGDADSVPDPQPLGQPPAAPTSLGSTTMATGSGAPMADNNEGADGVGNSSGNWHCDSQWLGDRVITTSTRTWALPTYNNHLYKQISSQSGASNDNHYFGYSTPWGYFDFNRFHCHFSPRDWQRLINNNWGFRPKRLNFKLFNIQVKEVTQNDGTTTIANNLTSTVQVFTDSEYQLPYVLGSAHQGCLPPFPADVFMVPQYGYLTLNNGSQAVGRSSFYCLEYFPSQMLRTGNNFTFSYTFEDVPFHSSYAHSQSLDRLMNPLIDQYLYYLNRTQSNSGTLQQSRLLFSQAGPTSMSLQAKNWLPGPCYRQQRLSKQANDNNNSNFPWTAATKYHLNGRDSLVNPGPAMASHKDDEEKFFPMHGTLIFGKQGTNANDADLEHVMITDEEEIRTTNPVATEQYGNVSNNLQNSNTGPTTENVNHQGALPGMVWQDRDVYLQGPIWAKIPHTDGHFHPSPLMGGFGLKHPPPQIMIKNTPVPANPPTNFSAAKFASFITQYSTGQVSVEIEWELQKENSKRWNPEIQYTSNYNKSVNVDFTVDTNGVYSEPRPIGTRYLTRNL

SEQ ID NO: 12835 - protein, 735 aa, Artificial Sequence
  source: /note="Description of Artificial Sequence: Synthetic polypeptide"
MAADGYLPDWLEDTLSEGIRQWWKLKPGPPPPKPAERHKDDSRGLVLPGYKYLGPFNGLDKGEPVNEADAAALEHDKAYDRQLDSGDNPYLKYNHADAEFQERLKEDTSFGGNLGRAVFQAKKRVLEPLGLVEEPVKTAPGKKRPVEHSPVEPDSSSGTGKAGQQPARKRLNFGQTGDADSVPDPQPLGQPPAAPTSLGSTTMATGSGAPMADNNEGADGVGNSSGNWHCDSQWLGDRVITTSTRTWALPTYNNHLYKQISSQSGASNDNHYFGHSTPWGYFDFNRFHCHFSPRDWQRLINNNWGFRPKRLNFKLFNIQVKEVTQNDGTTTIANNLTSTVQVFTDSEYQLPYVLGSAHQGCLPPFPADVFMVPQYGYLTLNNGSQAVGRSSFYCLEYFPSQMLRTGNNFTFSYTFEDVPFHSSYAHSQSLDRLMNPLIDQYLYYLNKTQSNSGTLQQSRLLFSQAGPTSMSLQAKNWLPGPCYRQQRLSKQANDNNNSNFPWTAATKYHLNGRDSLVNPGPAMASHKDDEEKFFPMHGTLIFGKQGTNANDADLDNVMITDEEEIRTTNPVATEQYGTVSNNLQNSNTGPTTGTVNHQGALPGMVWQDRDVYLQGPIWAKIPHTDGHFHPSPLMGGFGLKHPPPQIMIKNTPVPANPPTNFSSAKSASFITQYSTGQVSVEIEWELQKENSKRWNPEIQYTSNYNKSVNVDFTVDTNGVYSEPRPIGTRYLTRNL

SEQ ID NO: 12836 - protein, 735 aa, Artificial Sequence
  source: /note="Description of Artificial Sequence: Synthetic polypeptide"
MAADGYLPDWLEDTLSEGIRQWWKLKPGPPPPKPAERHKDDSRGLVLPGYKYLGPFNGLDKGEPVNEADAAALEHDKAYDRQLDSGDNPYLKYNHADAEFQERLKEDTSFGGNLGRAVFQAKKRVLEPLGLVEEPVKTAPGKKRPVEHSPVEPDSSSGTGKAGQQPARKRLNFGQTGDADSVPDPQPLGQPPAAPSGLGTNTMATGSGAPMADNNEGADGVGNSSGNWHCDSTWMGDRVITTSTRTWALPTYNNHLYKQISSQSGASNDNHYFGYSTPWGYFDFNRFHCHFSPRDWQRLINNNWGFRPKRLNFKLFNIQVKEVTQNDGTTTIANNLTSTVQVFTDSEYQLPYVLGSAHQGCLPPFPADVFMVPQYGYLTLNNGSQAVGRSSFYCLEYFPSQMLRTGNNFTFSYTFEDVPFHSSYAHSQSLDRLMNPLIDQYLYYLNKTQSNSGTLQQSRLLFSQAGPTSMSLQAKNWLPGPCYRQQRLSKQANDNNNSNFPWTAATKYHLNGRDSLVNPGPAMASHKDDEEKFFPMHGTLIFGKQGTNANDADLDNVMITDEEEIRTTNPVATEQYGTVSNNLQNSNTGPTTGTVNHQGALPGMVWQDRDVYLQGPIWAKIPHTDGHFHPSPLMGGFGLKHPPPQIMIKNTPVPANPPTNFSSAKFASFITQYSTGQVSVEIEWELQKENSKRWNPEIQYTSNYNKSVNVDFTVDTNGVYSEPRPIGTRYLTRNL

SEQ ID NO: 12837 - protein, 735 aa, Artificial Sequence
  source: /note="Description of Artificial Sequence: Synthetic polypeptide"
MAADGYLPDWLEDTLPEGIRQWWKLKPGPPPPKPAERHKDDSRGLVLPGYKYLGPFNGLDKGEPVNEADAAALEHDKAYDRQLDSGDNPYLKYNHADAEFQERLKEDTSFGGNLGRAVFQAKKRVLEPLGLVEEPVKTAPGKKRPVEHSPVEPDSSSGTGKAGQQPARKRLNFGQTGDADSVPDPQPLGQPPAAPTSLGSTTMATGSGAPMADNNEGADGVGNSSGNWHCDSQWLGDRVITTSTRTWALPTYNNHLYKQISSQSGASNDNHYFGHSTPWGYFDFNRFHCHFSPRDWQRLINNNWGFRPKRLNFKLFNIQVKEVTQNDGTTTIANNLTSTVQVFTDSEYQLPYVLGSAHQGCLPPFPADVFMVPQYGYLTLNNGSQAVGRSSFYCLEYFPSQMLRTGNNFTFSYTFEDVPFHSSYAHSQSLDRLMNPLIDQYLYYLNKTQSNSGTLQQSRLLFSQAGPTSMSLQAKNWLPGPCYRQQRLSKQANDNNNSNFPWTAATKYHLNGRDSLVNPGPAMASHKDDEEKFFPMHGTLIFGKQGTNANDADLDNVMITDEEEIRTTNPVATEQYGTVSNNLQNSNTGPTTGTVNHQGALPGMVWQDRDVYLQGPIWAKIPHTDGHFHPSPLMGGFGLKHPPPQIMIKNTPVPANPPTNFSSAKFASFITQYSTGQVSVEIEWELQKENSKRWNPEIQYTSNYNKSVNVDFTVDTNGVYSEPRPIGTRYLTRNL

SEQ ID NO: 12838 - protein, 735 aa, Artificial Sequence
  source: /note="Description of Artificial Sequence: Synthetic polypeptide"
MAADGYLPDWLEDTLSEGIRQWWKLKPGPPPPKPAERHKDDSRGLVLPGYKYLGPFNGLDKGEPVNEADAAALEHDKAYDRQLDSGDNPYLKYNHADAEFQERLKEDTSFGGNLGRAVFQAKKRVLEPLGLVEEPVKTAPGKKRPVEHSPVEPDSSSGTGKAGQQPARKRLNFGQTGDADSVPDPQPLGQTPAAPTSLGSTTMATGSGAPMADNNEGADGVGNSSGNWHCDSQWLGDRVITTSTRTWALPTYNNHLYKQISSQSGASNDNHYFGYSTPWGYFDFNRFHCHFSPRDWQRLINNNWGFRPKRLNFKLFNIQVKEVTQNDGTTTIANNLTSTVQVFTDSEYQLPYVLGSAHQGCLPPFPADVFMVPQYGYLTLNNGSQAVGRSSFYCLEYFPSQMLRTGNNFTFSYTFEDVPFHSSYAHSQSLDRLMNPLIDQYLYYLNKTQSNSGTLQQSRLLFSQAGPTSMSLQAKNWLPGPCYRQQRLSKQANDNNNSNFPWTAATKYHLNGRDSLVNPGPAMASHKDDEEKFFPMHGTLIFGKQGTNANDADLDNVMITDEEEIRTTNPVATEQYGTVSNNLQNSNTGPTTGTVNHQGALPGMVWQDRDVYLQGPIWAKIPHTDGHFHPSPLMGGFGLKHPPPQIMIKNTPVPANPPTNFSSAKFASFITQYSTGQVGVEIEWELQKENSKRWNPEIQYTSNYNKSVNVDFTVDTNGVYSEPRPIGTRYLTRNL

SEQ ID NO: 12839 - protein, 735 aa, Artificial Sequence
  source: /note="Description of Artificial Sequence: Synthetic polypeptide"
MAADGYLPDWLEDTLSEGIRQWWKLKPGPPPPKPAERHKDDSRGLVLPGYKYLGPFNGLDKGEPVNEADAAALEHDKAYDRQLDSGDNPYLKYNHADAEFQERLKEDTSFGGNLGRAVFQAKKRVLEPLGLVEEPVKTAPGKKRPVEHSPVEPDSSSGTGKAGQQPARKRLNFGQTGDADSVPDPQPLGQTPAAPTSLGSTTMATGSGAPMADNNEGADGVGNSSGNWHCDSQWLGDRVITTSTRTWALPTYNNHLYKQISSQSGASNDNHYFGYSTPWGYFDFNRFHCHFSPRDWQRLINNNWGFRPKRLNFKLFNIQVKEVTQNDGTTTIANNLTSTVQVFTDSEYQLPYVLGSAHQGCLPPFPADVFMVPQYGYLTLNNGSQAVGRSSFYCLEYFPSQMLRTGNNFTFSYTFEDVPFHSSYAHSQSLDRLMNPLIDQYLYYLNKTQSNSGTLQQSRLLFSQAGPTSMSLQAKNWLPGPCYRQQRLSKQANDNNNSNFPWTAATKYHLNGRDSLVNPGPAMASHKDDEEKFFPMHGTLIFGKQGTNANDADLDNVMITDEEEIRTTNPVATEQYGTVSNNLQNSNTGPTTGTVNHQGALPGMVWQDRDVYLQGPIWAKIPHTDGHFHPSPLMGGFGLKHPPPQIMIKNTPVPANPPTNFSSAKFASFITQYSTGQVSVEIEWELQKENSKRWNPEIQYTSNYNKSVNVDFTVDTNGVYSEPRPIGTRYLTRNL

SEQ ID NO: 12840 - protein, 735 aa, Artificial Sequence
  source: /note="Description of Artificial Sequence: Synthetic polypeptide"
MAADGYLPDWLEDTLSEGIRQWWKLKPGPPPPKPAERHKDDSRGLVLPGYKYLGPFNGLDKGEPVNEADAAALEHDKAYDRQLDSGDNPYLKYNHADAEFQERLKEDTSFGGNLGRAVFQAKKRVLEPLGLVEEPVKTAPGKKRPVEHSPVEPDSSSGTGKAGQQPARKRLNFGQTGDADSVPDPQPLGQPPAAPTSLGSTTMATGSGAPMADNNEGADGVGNSSGNRHCDSQWLGDRVITTSTRTWALPTYNNHLYKQISSQSGASNDNHYFGHSTPWGYFDFNRFHCHFSPRDWQRLINNNWGFRPKRLNFKLFNIQVKEVTQNDGTTTIANNLTSTVQVFTDSEYQLPYVLGSAHQGCLPPFPADVFMVPQYGYLTLNNGSQAVGRSSFYCLEYFPSQMLRTGNNFTFSYTFEDVPFHSSYAHSQSLDRLMNPLIDQYLYYLNKTQSNSGTLQQSRLLFSQAGPTSMSLQAKNWLPGPCYRQQRLSKQANDNNNSNFPWTAATKYHLNGRDSLVNPGPAMASHKDDEEKFFPMHGTLIFGKQGTNANDADLDNVMITDEEEIRTTNPVATEQYGTVSNNLQNSNTGPTTGTVNHQGALPGMVWQDRDVYLQGPIWAKIPHTDGHFHPSPLMGGFGLKHPPPQIMIKNTPVPANPPTNFSSAKFASFITQYSTGQVSVEIEWELQKENSKRWNPEIQYTSNYNKSVNVDFTVDTNGVYSEPRPIGTRYLTRNL

SEQ ID NO: 12841 - protein, 735 aa, Artificial Sequence
  source: /note="Description of Artificial Sequence: Synthetic polypeptide"
MAADGYLPDWLEDTLSEGIRQWWKLKPGPPPPKPAERHKDDSRGLVLPGYKYLGPFNGLDKGEPVNEADAAALEHDKAYDRQLDSGDNPYLKYNHADAEFQERLKEDTSFGGNLGRAVFQAKKRVLEPLGLVEEPVKTAPGKKRPVEHSPVEPDSSSGTGKAGQQPARKRLNFGQTGDADSVPDPQPLGQPPAAPTSLGSTTMATGSGAPMADNNEGADGVGNSSGNWHCDSQWLGDRVITTSTRTWALPTYNNHLYKQISSQSGASNDNHYFGYSTPWGYFDFNRFHCHFSPRDWQRLINNNWGFRPKRLNFKLFNIQVKEVTQNDGTTTIANNLTSTVQVFTDSEYQLPYVLGSAHQGCLPPFPADVFMVPQYGYLTLNNGSQAVGRSSFYCLEYFPSQMPRTGNNFTFSYTFEDVPFHSSYAHSQSLDRLMNPLIDQYLYYLNKTQSNSGTLQQSRLLFSQAGPTSMSLQAKNWLPGPCYRQQRLSKQANDNNNSNFPWTAATKYHLNGRDSLVNPGPAMASHKDDEEKFFPMHGTLIFGKQGTNANDADLDNVMITDEEEIRTTNPVATEQYGTVSNNLQNSNTGPTTGTVNHQGALPGMVWQDRDVYLQGPIWAKIPHTDGHFHPSPLMGGFGLKHPPPQIMIKNTPVPANPPTNFSSAKFASFITQYSTGQVSVEIEWELQKENSKRWNPEIQYTSNYNKSVNVDFTVDTNGVYSEPRPIGTRYLTRNL

SEQ ID NO: 12842 - protein, 735 aa, Artificial Sequence
  source: /note="Description of Artificial Sequence: Synthetic polypeptide"
MAADGYLPDWLEDTLSEGIRQWWKLKPGPPPPKPAERHKDDSRGLVLPGYKYLGPFNGLDKGEPVNEADAAALEHDKAYDRQLDSGDNPYLKYNHADAEFQERLKEDTSFGGNLGRAVFQAKKRVLEPLGLVEEPVKTAPGKKRPVEHSPVEPDSSSGTGKAGQQPARKRLNFGQTGDADSVPDPQPLGQPPAAPTSLGSTTMATGSGAPMADNNEGADGVGNSSGNWHCDSQWLGDRVITTSTRTWALPTYNNHLYKQISSQSGASNDNHYFGYSTPWGYFDFNRFHCHFSPRDWQRLINNNWGFRPKRLNFKLFNIQVKEVTQNDGTTTIANNLTSTVQVFTDSEYQLPYVLGSAHQGCLPPFPADVFMVPQYGYLTLNNGSQAVGRSSFYCLEYFPSQMLRTGNNFTFSYTFEDVPFHSSYAHSQSLDRLMNPLIDQYLYYLNKTQSNSGTLQQSRLLFSQAGPTSMSLQAKNWLPGPCYRQQRLSKQANDNNNSNFPWTAATKYHLNGRDSLVNPGPAMASHKDDEEKFFPMHGTLIFGKQGTNANDADLDNVMITDEEEIRTTNPVATEQYGTVSNNLQNSNTGPTTGTVNHQGALPGMVWQDRDVYLQGPIWAKIPHTDGHFHPSPLMGGFGLKHPPPQIMIKNTPVPANPPTNFSSAKSASFITQYSTGQVSVEIEWELQKENSKRWNPEIQYTSNYNKSVNVDFTVDTNGVYSEPRPIGTRYLTRNL

SEQ ID NO: 12843 - protein, 735 aa, Artificial Sequence
  source: /note="Description of Artificial Sequence: Synthetic polypeptide"
MAADGYLPDWLEDTLSEGIRQWWKLKPGPPPPKPAERHKDDSRGLVLPGYKYLGPFNGLDKGEPVNEADAAALEHDKAYDRQLDSGDNPYLKYNHADAEFQERLKEDTSFGGNLGRAVFQAKKRVLEPLGLVEEPVKTAPGKKRPVEHSPVEPDSSSGTGKAGQQPARKRLNFGQTGDADSVPDPQPLGQPPAAPTSLGSTTMATGSGAPMADNNEGADGVGNSSGNWHCDSQWLGDRVITTSTRTWALPTYNNHLYKQISSQSGASNDNHYFGHSTPWGYFDFNRFHCHFSPRDWQRLINNNWGFRPKRLNFKLFNIQVKEVTQNDGTTTIANNLTSTVQVFTDSEYQLPYVLGSAHQGCLPPFPADVFMVPQYGYLTLNNGSQAVGRSSFYCLEYFPSQMLRTGNNFTFSYTFEDAPFHSSYAHSQSLDRLMNPLIDQYLYYLNKTNNQSGTFTQSRLLFSQAGPTSILFKSKNWLPGPCYRQQRLSKTANDNNNSNFPWTAATKYHLNGRDSLVNPGPAMASHKDDEEKFFPQHGTLIFGKQGTKLTDADLDNVMITDEEEIRTTNPVATEQYGTVSNNLQKLNILATTGTVNTQGALPGMVWQDRDVYLQGPIWAKIPHTDGHFHPSPLMGGFGLKHPPPQIMIKNTPVPANPPTNFSSAKFASFITQYSTGQVSVEIEWELQKENSKRWNPEIQYTSNYNKSVNVDFTVDTNGVYSEPRPIGTRYLTRNL

SEQ ID NO: 12844 - protein, 735 aa, Artificial Sequence
  source: /note="Description of Artificial Sequence: Synthetic polypeptide"
MAADGYLPDWLEDTLSEGIRQWWKLKPGPPPPKPAERHKDASRGLVLPGYKYLGPFNGLDKGEPVNEADAAALEHDKAYDRQLDSGDNPYLKYNHADAEFQERLKEDTSFGGNLGRAVFQAKKRVLEPLGLVEEPVKTAPGKKRPVEHSPVEPDSSSGTGKAGQQPARKRLNFGQTGDADSVPDPQPLGQPPAAPTSLGSTTMATGSGAPMADNNEGADGVGNSSGNWHCDSQWLGDRVITTSTRTWALPTYNNHLYKQISSQSGASNDNHYFGYSTPWGYFDFNRFHCHFSPRDWQRLINNNWGFRPKRLNFKLFNIQVKEVTQNDGTTTIANNLTSTVQVFTDSEYQLPYVLGSAHQGCLPPFPADVFMVPQYGYLTLNNGSQAVGRSSFYCLEYFPSQMLRTGNNFTFSYTFEDVPFHSSYAHSQSLDRLMNPLIDQYLYYLNKTNNQSGTFTQSRLLFSQAGPTSILFKSKNWLPGPCYRQQRLSKTANDNNNSNFPWTAATKYHLNGRDSLVNPGPAMASHKDDEEKFFPMHGTLIFGKQGTKLTDADLDNVMITDEEEIRTTNPVATEQYGTVSNNLQKLNILATTGTVNTQGALPGMVWQDRDVYLQGPIWAKIPHTDGHFHPSPLMGGFGLKHPPPQIMIKNTPVPANPPTNFSSAKFASFITQYSTGQVSVEIEWELQKENSKRWNPEIQYTSNYNKSVNVDFTVDTNGVYSEPRPIGTRYLTRNL

SEQ ID NO: 12845 - protein, 735 aa, Artificial Sequence
  source: /note="Description of Artificial Sequence: Synthetic polypeptide"
MAADGYLPDWLEDTLSEGIRQWWKLKPGPPPPKPAERHKDDSRGLVLPGYKYLGPFNGLDKGEPVNEADAAALEHDKAYDRQLDSGDNPYLKYNHADAEFQERLKEDTSFGGNLGRAVFQAKKRVLEPLGLVEEPVKTAPGKKRPVEHSPVEPDSSSGTGKAGQQPARKRLNFGQTGDADSVPDPQPLGQPPAAPSGLGTNTMATGSGAPMADNNEGADGVGNSSGNWHCDSTWMGDRVITTSTRTWALPTYNNHLYKQISSQSGASNDNHYFGYSTPWGYFDFNRFHCHFSPRDWQRLINNNWGFRPKRLNFKLFNIQVKEVTQNDGTTTIANNLTSTVQVFTDSEYQLPYVLGSAHQGCLPPFPADVFMVPQYGYLTLNNGSQAVGRSSFYCLEYFPSQMLRTGNNFTFSYTFEDVPFHSSYAHSQSLDRLMNPLIDQYLYYLNKTNNQSGTFTQSRLLFSQAGPTSILFKSKNWLPGPCYRQQRLSKTANDNNNSNFPWTAATKYHLNGRDSLVNPGPAMASHKDDEEKFFPQHGTLIFGKQGTKLTDADLDNVMITDEEEIRTTNPVATEQYGTVSNNLQKLNILATTGTVNTQGALPGMVWQDRDVYLQGPIWAKIPHTDGHFHPSPLMGGFGLKHPPPQIMIKNTPVPANPPTNFSSAKFASFITQYSTGQVSVEIEWELQKENSKRWNPEIQYTSNYNKSVNVDFTVDTNGVYSEPRPIGTRYLTRNL

SEQ ID NO: 12846 - protein, 735 aa, Artificial Sequence
  source: /note="Description of Artificial Sequence: Synthetic polypeptide"
MAADGYLPDWLEDTLSEGIRQWWKLKPGPPPPKPAERHKDDSRGLVLPGYKYLGPFNGLDKGEPVNEADAAALEHDKAYDRQLDSGDNPYLKYNHADAEFQERLKEDTSFGGNLGRAVFQAKKRVLEPLGLVEEPVKTAPGKKRPVEHSPVEPDSSSGTGKAGQQPARKRLNFGQTGDADSVPDPQPLGQPPAAPTSLGSTTMATGSGAPMADNNEGADGVGNSSGNWHCDSQWLGDRVITTSTRTWALPTYNNHLYKQISSQSGASNDNHYFGHSTPWGYFDFNRFHCHFSPRDWQRLINNNWGFRPKRLNFKLFNIQVKEVTQNDGTTTIANNLTSTVQVFTDSEYQLPYVLGSAHQGCLPPFPADVFMVPQYGYLTLNNGSQAVGRSSFYCLEYFPSQMLRTGNNFTFSYTFEDVPFHSSYAHSQSLDRLMNPLIDQYLYYLNKTNNQSGTFTQSRLLFSQAGPTSILFKSKNWLPGPCYRQQRLSKTANDNNNSNFPWTAATKYHLNGRDSLVNPGPAMASHKDDEEKFFPMHGTLIFGKQGTKLTDADLDNVMITDEEEIRTTNPVATEQYGTVSNNLQKLNILATTGTVNTQGALPGMVWQDRDVYLQGPIWAKIPHTDGHFHPSPLMGGFGLKHPPPQIMIKNTPVPANPPTNFSSAKFASFITQYSTGQVSVEIEWELQKENSKRWNPEIQYTSNYNKSVNVDFTVDTNGVYSEPRPIGTRYLTRNL

SEQ ID NO: 12847 - protein, 735 aa, Artificial Sequence
  source: /note="Description of Artificial Sequence: Synthetic polypeptide"
MAADGYLPDWLEDTLSEGIRQWWKLKPGPPPPKPAERHKDDSRGLVLPGYKYLGPFNGLDKGEPVNEADAAALEHDKAYDRQLDSGDNPYLKYNHADAEFQERLKEDTSFGGNLGRAVFQAKKRVLEPLGLVEEPVKTAPGKKRPVEHSPVEPDSSSGTGKAGQQPARKRLNFGQTGDADSVPDPQPLGQPPAAPTSLGSTTMATGSGAPMADNNEGADGVGNSSGNWHCDSQWLGDRVITTSTRTWALPTYNNHLYKQISSQSGASNDNHYFGYSTPWGYFDFNRFHCHFSPRDWQRLINNNWGFRPKRLNFKLFNIQVKEVTQNDGTTTIANNLTSTVQVFTDSEYQLPYVLGSAHQGCLPPFPADVFMVPQYGYLTLNNGSQAVGRSSFYCLEYFPSQMLRTGNNFTFSYTFEDVPFHSSYAHSQSLDRLMNPLIDQYLYYLNKTNNQSGTFTQSRLLFSQAGPTSILFKSKNWLPGPCYRQQRLSKTANDNNNSNFPWTAATKYHLNGRDSLVNPGPAMASHKDDEEKFFPQHGTLIFGKQGTKLTDADLDNVMITDEEEIRTTNPVATEQYGTVSNNLQKLNILATTGTVNTQGALPGMVWQDRDVYLQGPIWAKIPHTDGHFHPSPLMGGFGLKHPPPQIMIKNTPVPANPPTNFSSAKFASFITQYSTGQVSVEIEWELQKENSKRWNPEIQYTSNYNKSVNVDFTVDTNGVYSEPRPIGTRYLTRNL

SEQ ID NO: 12848 - protein, 735 aa, Artificial Sequence
  source: /note="Description of Artificial Sequence: Synthetic polypeptide"
MAADGYLPDWLEDTLSEGIRQWWKLKPGPPPPKPAERHKDASRGLVLPGYKYLGPFNGLDKGEPVNEADAAALEHDKAYDRQLDSGDNPYLKYNHADAEFQERLKEDTPFGGNLGRAVFQAKKRVLEPLGLVEEPVKTAPGKKRPVEHSPVEPDSSSGTGKAGQRPARKRLNFGQTGDADSVPDPQPLGQPPAAPTSLGSTTMATGSGAPMADNNEGADGVGNSSGNWHCDSQWLGDRVITTSTRTWALPTYNNHLYKQIPSQSGASNDNHYFGYSTPWGYFDFNRFHCHFSPRDWQRLINNNWGFRPKRLNFKLFNIQVKEVTQNDGTTTIANNLTSTVQVFTDSEYQLPYVLGSAHQGCLPPFPADVFMVPQYGYLTLNNGSQAVGRSSFYCLEYFPSQMLRTGNNFTFSYTFEDVPFHSSYAHSQSLDRLMNPLIDQYLYYLNKTNNQSGTFTQSRLLFSQAGPTSILFKSKNWLPGPCYRQQRLSKTANDNNNSNFPWTAATKYHLNGRDSLVNPGPAMASHKDDEEKFFPQHGTLIFGKQGTKLTDADLDNVMITDEEEIRTTNPVATEQYGTVSNNLQKLNILATTGTVNTQGALPGMVWQDRDVYLQGPIWAKIPHTDGHFHPSPLMGGFGLKHPPPQIMIKNTPVPANPPTNFSSAKFASFITQYSTGQVSVEIEWELQKENSKRWNPEIQYTSNYNKSVNVDFTVDTNGVYSEPRPIGTRYLTRNL

SEQ ID NO: 12849 - protein, 735 aa, Artificial Sequence
  source: /note="Description of Artificial Sequence: Synthetic polypeptide"
MAADGYLPDWLEDTLSEGIRQWWKLKPGPPPPKPAERHKDDSRGLVLPGYKYLGPFNGLDKGEPVNEADAAALEHDKAYDRQLDSGDNPYLKYNHADAEFQERLKEDTSFGGNLGRAVFQAKKRVLEPLGLVEEPVKTAPGKKRPVEHSPVEPDSSSGTGKAGQQPARKRLNFGQTGDADSVPDPQPLGQPPAAPSGLGTNTMATGSGAPMADNNEGADGVGNSSGNWHCDSTWMGDRVITTSTRTWALPTYNNHLYKQISSQSGASNDNHYFGYSTPWGYFDFNRFHCHFSPRDWQRLINNNWGFRPKRLNFKLFNIQVKEVTQNDGTTTIANNLTSTVQVFTDSEYQLPYVLGSAHQGCLPPFPADVFMVPQYGYLTLNNGSQAVGRSSFYCLEYFPSQMLRTGNNFTFSYTFEDAPFHSSYAHSQSLDRLMNPLIDQYLYYLNKTNNQSGTFTQSRLLFSQAGPTSILFKSKNWLPGPCYRQQRLSKTANDNNNSNFPWTAATKYHLNGRDSLVNPGPAMASHKDDEEKFFPQHGTLIFGKQGTKLTDADLDNVMITDEEEIRTTNPVATEQYGTVSNNLQKLNILATTGTVNTQGALPGMVWQDRDVYLQGPIWAKIPHTDGHFHPSPLMGGFGLKHPPPQIMIKNTPVPANPPTNFSSAKFASFITQYSTGQVSVEIEWELQKENSKRWNPEIQYTSNYNKSVNVDFTVDTNGVYSEPRPIGTRYLTRNL

SEQ ID NO: 12850 - protein, 735 aa, Artificial Sequence
  source: /note="Description of Artificial Sequence: Synthetic polypeptide"
MAADGYLPDWLEDILSEGIRQWWKLKPGPPPPKPAERHKDASRGLVLPGYKYLGPFNGLDKGEPVNEADAAALEHDKAYDRQLDSGDNPYLKYNHADAEFQERLKEDTSFGGNLGRAVFQAKKRVLEPLGLVEEPVKTAPGKKRPVEHSPVEPDSSSGTGKAGQQPARKRLNFGQTGDADSVPDPQPLGQPPAAPTSLGSTTMATGSGAPMADNNEGADGVGNSSGNWHCDSQWLGDRVITTSTRTWALPTYNNHLYKQISSQSGASNDNHYFGYSTPWGYFDFNRFHCHFSPRDWQRLINNNWGFRPKRLNFKLFNIQVKEVTQNDGTTTIANNLTSTVQVFTDSEYQLPYVLGSAHQGCLPPFPADVFMVPQYGYLTLNNGSQAVGRSSFYCLEYFPSQMLRTGNNFTFSYTFEDVPFHSSYAHSQSLDRLMNPLIDQYLYYLNKTNNQSGTFTQSRLLFSQAGPTSILFKSKNWLPGPCYRQQRLSKTANDNNNSNFPWTAATKYHLNGRDSLVNPGPAMASHKDDEEKFFPQHGTLIFGKQGTKLTDADLDNVMITDEEEIRTTNPVATEQYGTVSNNLQKLNILATTGTVNTQGALPGMVWQDRDVYLQGPIWAKIPHTDGHFHPSPLMGGFGLKHPPPQIMIKNTPVPANPPTNFSSAKFASFITQYSTGQVSVEIEWELQKENSKRWNPEIQYTSNYNKSVNVDFTVDTNGVYSEPRPIGTRYLTRNL

SEQ ID NO: 12851 - protein, 735 aa, Artificial Sequence
  source: /note="Description of Artificial Sequence: Synthetic polypeptide"
MAADGYLPDWLEDILSEGIRQWWKLKPGPPPPKPAERHKDASRGLVLPGYKYLGPFNGLDKGEPVNEADAAALEHDKAYDRQLDSGDNPYLKYNHADAEFQERLKEDTSFGGNLGRAVFQAKKRVLEPLGLVEEPVKTAPGKKRPVEHSPVEPDSSSGTGKAGQQPARKRLNFGQTGDADSVPDPQPLGQPPAAPTSLGSTTMATGSGAPMADNNEGADGVGNSSGNWHCDSQWLGDRVIATSTRTWALPTYNNHLYKQISSQSGASNDNHYFGYSTPWGYFDFNRFHCHFSPRDWQRLINNNWGFRPKRLNFKLFNIQVKEVTQNDGTTTIANNLTSTVQVFTDSEYQLPYVLGSAHQGCLPPFPADVFMVPQYGYLTLNNGSQAVGRSSFYCLEYFPSQMLRTGNNFTFSYTFEDVPFHSSYAHSQSLDRLMNPLIDQYLYYLNKTNNQSGTFTQSRLLLSQAGPTSILFKSKNWLPGPCYRQQRLSKTANDNNNSNFPWTAATKYHLNGRDSLVNPGPAMASHKDDEEKFFPQHGTLIFGKQGTKLTDADLDNVMITDEEEIRTTNPVATEQYGTVSNNLQKLNILATTGTVNTQGALPGMVWQDRDVYLQGPIWAKIPHTDGHFHPSPLMGGFGLKHPPPQIMIKNTPVPANPPTNFSSAKFASFITQYSTGQVSVEIEWELQKENSKRWNPEIQYTSNYNKSVNVDFTVDTNGVYSEPRPIGTRYLTRNL

SEQ ID NO: 12852 - protein, 735 aa, Artificial Sequence
  source: /note="Description of Artificial Sequence: Synthetic polypeptide"
MAADGYLPDWLEDTLSEGIRQWWKLKPGPPPPKPAERHKDASRGLVLPGYKYLGPFNGLDKGEPVNEADAAALEHDKAYDRQLDSGDNPYLKYNHADAEFQERLKEDTPFGGNLGRAVFQAKKRVLEPLGLVEEPVKTAPGKKRPVEHSPVEPDSSSGTGKAGQQPARKRLNFGQTGDADSVPDPQPLGQPPAAPTSLGSTTMATGSGAPMADNNEGADGVGNSSGNWHCDSQWLGDRVITTSTRTWALPTYNNHLYKQIPSQSGASNDNHYFGYSTPWGYFDFNRFHCHFSPRDWQRLINNNWGFRPKRLNFKLFNIQVKEVTQNDGTTTIANNLTSTVQVFTDSEYQLPYVLGSAHQGCLPPFPADVFMVPQYGYLTLNNGSQAVGRSSFYCLEYFPSQMLRTGNNFTFSYTFEDVPFHSSYAHSQSLDRLMNPLIDQYLYYLNKTNNQSGTFTQSRLLFSQAGPTSILFKSKNWLPGPCYRQQRLSKTANDNNNSNFPWTAATKYHLNGRDSLVNPGPAMASHKDDEEKFFPQHGTLIFGKQGTKLTDADLDNVMITDEEEIRTTNPVATEQYGTVSNNLQKLNILATTGTVNTQGALPGMVWQDRDVYLQGPIWAKIPHTDGHFHPSPLMGGFGLKHPPPQIMIKNTPVPANPPTNFSSAKFASFITQYSTGQVSVEIEWELQKENSKRWNPEIQYTSNYNKSVNVDFTVDTNGVYSEPRPIGTRYLTRNL

SEQ ID NO: 12853 - protein, 735 aa, Artificial Sequence
  source: /note="Description of Artificial Sequence: Synthetic polypeptide"
  MOD_RES (172)..(172): Any naturally occurring amino acid
  MOD_RES (220)..(220): Any naturally occurring amino acid
  MOD_RES (367)..(367): Any naturally occurring amino acid
  MOD_RES (499)..(499): Any naturally occurring amino acid
  MOD_RES (558)..(558): Any naturally occurring amino acid
  MOD_RES (590)..(590): Any naturally occurring amino acid
  MOD_RES (597)..(597): Any naturally occurring amino acid
MAADGYLPDWLEDTLSEGIRQWWKLKPGPPPPKPAERHKDDSRGLVLPGYKYLGPFNGLDKGEPVNEADAAALEHDKAYDRQLDSGDNPYLKYNHADAEFQERLKEDTSFGGNLGRAVFQAKKRVLEPLGLVEEPVKTAPGKKRPVEHSPVEPDSSSGTGKAGQQPARKRLXFGQTGDADSVPDPQPLGQPPAAPSGLGTNTMATGSGAPMADNNEGADXVGNSSGNWHCDSTWMGDRVITTSTRTWALPTYNNHLYKQISSQSGASNDNHYFGYSTPWGYFDFNRFHCHFSPRDWQRLINNNWGFRPKRLNFKLFNIQVKEVTQNDGTTTIANNLTSTVQVFTDSEYQLPYVLGSAHQGCLPPFPXDVFMVPQYGYLTLNNGSQAVGRSSFYCLEYFPSQMLRTGNNFTFSYTFEDVPFHSSYAHSQSLDRLMNPLIDQYLYYLNKTNNQSGTFTQSRLLFSQAGPTSILFKSKNWLPGPCYRQQRLSKTANDNNNSXFPWTAATKYHLNGRDSLVNPGPAMASHKDDEEKFFPMHGTLIFGKQGTKLTDADLDNVXITDEEEIRTTNPVATEQYGTVSNNLQKLNILXTTGTVNXQGALPGMVWQDRDVYLQGPIWAKIPHTDGHFHPSPLMGGFGLKHPPPQIMIKNTPVPANPPTNFSYAKFASFITQYSTGQVSVEMEWELQKENSKRWNPEIPYTSKYNKSVNVDFTVDTNGVYSEPRPIGTRYLTRNL

SEQ ID NO: 12854 - protein, 735 aa, Artificial Sequence
  source: /note="Description of Artificial Sequence: Synthetic polypeptide"
MAADGYLPDWLEDTLSEGIRQWWKLKPGPPPPKPAERHQDDSRGLVLPGYKYLGPFNGLDKGEPVNEADAAALEHDKAYDRQLDSGDNPYLKYNHADAEFQERLKEDTSFGGNLGRAVFQAKKRVLEPLGLVEEPVKTAPGKKRPVEHSPAEPDSSSGTGKAGQQPARKRLNFGQTGDADSVPDPQPLGQPPAAPTSLGSTTMATGSGAPMADNNEGADGVGNSSGNWHCDSQWLGDRVITTSTRTWALPTYNNHLYKQISSQSGASNDNHYFGYSTPWGYFDFNRFHCHFSPRDWQRLINNNWGFRPKRLNFKLFNIQVKEVTQNDGTTTIANNLTSTVQVFTDSEYQLPYVLGSAHQGCLPPFPADVFMVPQYGYLTLNNGSQAVGRSSFYCLEYFPSQMLRTGNNFTFSYTFEDVPFHSSYAHSQSLDRLMNPLIDQYLYYLNRTQSNSGTLQQSRLLFSQAGPTSMSLQAKNWLPGPCYRQQRLSKQANDNNNSNFPWTAATKYHLNGRDSLVNPGPAMASHKDDEEKFFPMHGTLIFGKQGTNANDADLEHVMITDEEEIRTTNPVATEQYGNVSNNLQNSNTGPTTENVNHQGALPGMVWQDRDVYLQGPIWAKIPHTDGHFHPSPLMGGFGLKHPPPQIMIKNTPVPANPPTNFSAAKFASFITQYSTGQASVEIEWELQKENSKRWNPEIQYTSNYNKSVNVDFTVDTNGVYSEPRPIGTRYLTRNL

SEQ ID NO: 12855 - protein, 735 aa, Artificial Sequence
  source: /note="Description of Artificial Sequence: Synthetic polypeptide"
MAADGYLPDWLEDTLSEGIRQWWKLKPGPPPPKPAERHKDDSRGLVLPGYKYLGPFNGLDKGEPVNEADAAALEHDKAYDRQLDSGDNPYLKYNHADAEFQERLKEDTSFGGNLGRAVFQAKKRVLEPLGLVEEPVKTAPGKKRPVEHSPVEPDSSSGTGKAGQQPARKRLNFGQTGDADSVPDPQPLGQPPAAPTSLGSTTMATGSGAPMADNNEGADGVGNSSGNWHCDSQWLGDRVITTSTRTWALPTYNNHLYKQISSQSGASNDNHYFGHSTPWGYFDFNRFHCHFSPRDWQRLINNNWGFRPKRLNFKLFNIQVKEVTQNDGTTTIANNLTSTVQVFTDSEYQLPYVLGSAHQGCLPPFPADVFMVPQYGYLTLNNGSQAVGRSSFYCLEYFPSQMLRTGNNFTFSYTFEDVPFHSSYAHSQSLDRLMNPLIDQYLYYLNKTQSNSGTLQQSRLLFSQAGPTSMPLQAKNWLPGPCYRQQRLSKQANDNNNSNFPWTAATKYHLNGRDSLVNPGPAMASHKDDEEKFFPMHGTLIFGKQGTNANDADLDNVMITDEEEIRTTNPVATEQYGTVSNNLQNSNTGPTTGTVNHQGALPGMVWQDRDVYLQGPIWAKIPHTDGHFHPSPLMGGFGLKHPPPQIMIKNTPVPANPPTNFSSAKFASFITQYSTGQVSVEIEWELQKENSKRWNPEIQYTSNYNKSVNVDFTVDTNGVYSEPRPIGTRYLTRNL

SEQ ID NO: 12856 - protein, 735 aa, Artificial Sequence
  source: /note="Description of Artificial Sequence: Synthetic polypeptide"
MAADGYLPDWLEDTLSEGIRQWWKLKPGPPPPKPAERHKDDSRGLVLPGYKYLGPFNGLDKGEPVNEADAAALEHDKAYDRQLDSGDNPYLKYNHADAEFQERLKEDTSFGGNLGRAVFQAKKRVLEPLGLVEEPVKTAPGKKRPVEHSPVEPDSSSGTGKAGQQPARKRLNFGQTGDADSVPDPQPLGQPPAAPTSLGSTTMATGSGAPMADNNEGADGVGNSSGNWHCDSQWLGDRVITTSTRTWALPTYNNHLYKQISSQSGASNDNHYFGHSTPWGYFDFNRFHCHFSPRDWQRLINNNWGFRPKRLNFKLFNIQVKEVTQNDGTTTIANNLTSTVQVFTDSEYQLPYVLGSAHQGCLPPFPADVFMVPQYGYLTLNNGSQAVGRSSFYCLEYFPSQMLRTGNNFTFSYTFEDVPFHSSYAHSQSLDRLMNPLIDQYLYYLNKTQSNSGTLQQSRLLFSQAGPTSMSLQAKNWLPGPCYRQQRLSKQANDNNNSNFPWTAATKYHLNGRDSLVNPGPAMASHKDDEEKFFPMHGTLIFGKQGTNANDADLDNVMITDEEEIRTTNPVATEQYGTVSNNLQNSNTGPTTGTANHQGALPGMVWQDRDVYLQGPIWAKIPHTDGHFHPSPLMGGFGLKHPPPQIMIKNTPVPANPPTNFSSAKFASFITQYSTGQVSVEIEWELQKENSKRWNPEIQYTSNYNKSVNVDFTVDTNGVYSEPRPIGTRYLTRNL

SEQ ID NO: 12857 - protein, 735 aa, Artificial Sequence
  source: /note="Description of Artificial Sequence: Synthetic polypeptide"
MAADGYLPDWLEDTLSEGIRQWWKLKPGPPPPKPAERHKDDSRGLVLPGYKYLGPFNGLDKGEPVNEADAAALEHDKAYDRQLDSGDNPYLKYNHADAEFQERLKEDTSFGGNLGRAVFQAKKRVLEPLGLVEEPVKTAPGKKRPVEHSPVEPDSSSGTGKAGQQPARKRLNFGQTGDAGSVPDPQPLGQPPAAPTSLGSTTMATGSGAPMADNNEGADGVGNSSGNWHCDSQWLGDRVITTSTRTWALPTYNNHLYKQISSQSGASNDNHYFGHSTPWGYFDFNRFHCHFSPRDWQRLINNNWGFRPKRLNFKLFNIQVKEVTQNDGTTTIANNLTSTVQVFTDSEYQLPYVLGSAHQGCLPPFPADVFMVPQYGYLTLNNGSQAVGRSSFYCLEYFPSQMLRTGNNFTFSYTFEDVPFHSSYAHSQSLDRLMNPLIDQYLYYLNKTQSNSGTLQQSRLLFSQAGPTSMSLQAKNWLPGPCYRQQRLSKQANDNNNSNFPWTAATKYHLNGRDSLVNPGPAMASHKDDEEKFFPMHGTLIFGKQGTNANDADLDNVMITDEEEIRTTNPVATEQYGTVSNNLQNSNTGPTTGTVNHQGALPGMVWQDRDVYLQGPIWAKIPHTDGHFHPSPLMGGFGLKHPPPQIMIKNTPVPANPPTNFSSAKFASFITQYSTGQVSVEIEWELQKENSKRWNPEIQYTSNYNKSVNVDFTVDTNGVYSEPRPIGTRYLTRNL

SEQ ID NO: 12858 - protein, 735 aa, Artificial Sequence
  source: /note="Description of Artificial Sequence: Synthetic polypeptide"
MAADGYLPDWLEDTLSEGIRQWWKLKPGPPPPKPAERHKDDSRGLVLPGYKYLGPFNGLDKGEPVNEADAAALEHDKAYDRQLDSGDNPYLKYNHADAEFQERLKEDTSFGGNLGRAVFQAKKRVLEPLGLVEEPVKTAPGKKRPVEHSPVEPDSSSGTGKAGQQPARKRLNFGQTGDADSVPDPQPLGQPPAAPTSLGSTTMATGSGAPMADNNEGADGVGNSSGNWHCDSQWLDDRVITTSTRTWALPTYNNHLYKQISSQSGASNDNHYFGHSTPWGYFDFNRFHCHFSPRDWQRLINNNWGFRPKRLNFKLFNIQVKEVTQNDGTTTIANNLTSTVQVFTDSEYQLPYVLGSAHQGCLPPFPADVFMVPQYGYLTLNNGSQAVGRSSFYCLEYFPSQMLRTGNNFTFSYTFEDVPFHSSYAHSQSLDRLMNPLIDQYLYYLNKTQSNSGTLQQSRLLFSQAGPTSMSLQAKNWLPGPCYRQQRLSKQANDNNNSNFPWTAATKYHLNGRDSLVNPGPAMASHKDDEEKFFPMHGTLIFGKQGTNANDADLDNVMITDEEEIRTTNPVATEQYGTVSNNLQNSNTGPTTGTVNHQGALPGMVWQDRDVYLQGPIWAKIPHTDGHFHPSPLMGGFGLKHPPPQIMIKNTPVPANPPTNFSSAKFASFITQYSTGQVSVEIEWELQKENSKRWNPEIQYTSNYNKSVNVDFTVDTNGVYSEPRPIGTRYLTRNL

SEQ ID NO: 12859 - protein, 735 aa, Artificial Sequence
  source: /note="Description of Artificial Sequence: Synthetic polypeptide"
MAADGYLPDWLEDTLSEGIRQWWKLKPGPPPPKPAERHKDDSRGLVLPGYKYLGPFNGLDKGEPVNEADAAALEHDKAYDRQLDSGDNPYLKYNHADAEFQERLKEDTSFGGNLGRAVFQAKKRVLEPLGLVEEPVKTAPGKKRPVEHSPVEPGSSSGTGKAGQQPARKRLNFGQTGDADSVPDPQPLGQPPAAPTSLGSTTMATGSGAPMADNNEGADGVGNSSGNWHCDSQWLGDRVITTSTRTWALPTYNNHLYKQISSQSGASNDNHYFGHSTPWGYFDFNRFHCHFSPRDWQRLINNNWGFRPKRLNFKLFNIQVKEVTQNDGTTTIANNLTSTVQVFTDSEYQLPYVLGSAHQGCLPPFPADVFMVPQYGYLTLNNGSQAVGRSSFYCLEYFPSQMLRTGNNFTFSYTFEDVPFHSSYAHSQSLDRLMNPLIDQYLYYLNKTQSNSGTLQQSRLLFSQAGPTSMSLQAKNWLPGPCYRQQRLSKQANDNNNSNFPWTAATKYHLNGRDSLVNPGPAMASHKDDEEKFFPMHGTLIFGKQGTNANDADLDNVMITDEEEIRTTNPVATEQYGTVSNNLQNSNTGPTTGTVNHQGALPGMVWQDRDVYLQGPIWAKIPHTDGHFHPSPLMGGFGLKHPPPQIMIKNTPVPANPPTNFSSAKFASFITQYSTGQVSVEIEWELQKENSKRWNPEIQYTSNYNKSVNVDFTVDTNGVYSEPRPIGTRYLTRNL

SEQ ID NO: 12860 - protein, 735 aa, Artificial Sequence
  source: /note="Description of Artificial Sequence: Synthetic polypeptide"
MAADGYLPDWLEDTLSEGIRQWWKLKPGPPPPKPAERHKDDSRGLVLPGYKYLGPFNGLDKGEPVNEADAAALEHDKAYDRQLDSGDNPYLKYNHADAEFQERLKEDTSFGGNLGRAVFQAKKRVLEPLGLVEEPVKTAPGKKRPVEHSPVEPDSSSGTGKAGQQPARKRLNFGQTGDADSVPDPQPLGQPPAAPTSLGSTTMATGSGAPMADNNEGADGVGNSSGNWHCDSQWLGDRVITTSTRTWALPTYNNHLYKQISSQSGASNDNHYFGHSTPWGYFDFNRFHCHFSPRDWQRLINNNWGFRPKRLNFKLFNIQVKEVTQNDGTTTIANNLTSTVQVFTDSEYQLPYVLGSAHQGCLPPFPADVFMVPQYGYLTLNNGSQAVGRSSFYCLEYFPSQMLRTGNNFTFSYTFEDVPFHSSYAHSQSLDRLMNPLIDQYLYYLNKTQSNSGTLQQSRLLFSQAGPTSMSLQAKNWLPGPCYRQQRLSKQANDNNNSNFPWTAATKYHLNGRDSLVNPGPAMASHKDDEEKFFPMHGTLIFGKQGTNANDADLDNVMITDEEEIRTTNPVATEQYGTVSNNLQNSNTGPTTGTVNHQGALPGMVWQDRDVYLQGPIWAKIPHTDGHFHPSPLMGGFGLKHPPPQIMIKNTPVPANPPTNFSSAKFASFITQYSTGQVSVEIGWELQKENSKRWNPEIQYTSNYNKSVNVDFTVDTNGVYSEPRPIGTRYLTRNL

SEQ ID NO: 12861 - protein, 735 aa, Artificial Sequence
  source: /note="Description of Artificial Sequence: Synthetic polypeptide"
MAADGYLPDWLEDTLSEGIRQWWKLKPGPPPPKPAERHKDDSRGLVLPGYKYLGPFNGLDKGEPVNEADAAALEHDKAYDRQLDSGDNPYLKYNHADAEFQERLKEDTSFGGNLGRAVFQAKKRVLEPLGLVEEPVKTAPGKKRPVEHSPVEPDSSSGTGKAGQQPARKRLNFGQTGDADSVPDPQPLGQPPAAPTSLGSTTMATGSGAPMADNNEGADGVGNSSGNWHCDSQWLGDRVITTSTRTWALPTYNNHLYKQISSQSGASNDNHYFGHSTPWGYFDFNRFHCHFSPRDWQRLINNNWGFRPKRLNFKLFNIQVKEVTQNDGTTTIANNLTSTVQVFTDSEYQLPYVLGSAHQGCLPPFPADVFMVPQYGYLTLNNGSQAVGRSSFYCLEYFPSQMLRTGNNFTFSYTFEDVPFHSSYAHSQSLDRLMNPLIDRYLYYLNKTQSNSGTLQQSRLLFSQAGPTSMSLQAKNWLPGPCYRQQRLSKQANDNNNSNFPWTAATKYHLNGRDSLVNPGPAMASHKDDEEKFFPMHGTLIFGKQGTNANDADLDNVMITDEEEIRTTNPVATEQYGTVSNNLQNSNTGPTTGTVNHQGALPGMVWQDRDVYLQGPIWAKIPHTDGHFHPSPLMGGFGLKHPPPQIMIKNTPVPANPPTNFSSAKFASFITQYSTGQVSVEIEWELQKENSKRWNPEIQYTSNYNKSVNVDFTVDTNGVYSEPRPIGTRYLTRNL

SEQ ID NO: 12862 - protein, 735 aa, Artificial Sequence
  source: /note="Description of Artificial Sequence: Synthetic polypeptide"
MAADGYLPDWLEDTLSEGIRQWWKLKPGPPPPKPAERHKDDSRGLVLPGYKYLGPFNGLDKGEPVNEADAAALEHDKAYDRQLDSGDNPYLKYNHADAEFQERLKEDTSFGGNLGRAVFQAKKRVLEPLGLVEEPVKTAPGKKRPVEHSPVEPDSSSGTGKAGQQPARKRLNFGQTGDADSVPDPQPLGQPPAAPTSLGSTTMATGSGAPMADNNEGADGVGNSSGNWHCDSQWLGDRVITTSTRTWALPTYNNHLYKQISSQSGASNDNHYFGHSTPWGYFDFNRFHCHFSPRDWQRLINNNWGFRPKRLNFKLFNIQVKEVTQNDGTTTIANNLTSTVQVFTDSEYQLPYVLGSAHQGCLPPFPADVFMVPQYGYLTLNNGSQAVGRSSFYCLEYFPSQMLRTGNNFTFSYTFEDVPFHSSYAHSQSLDRLMNPLIDQHLYYLNKTQSNSGTLQQSRLLFSQAGPTSMSLQAKNWLPGPCYRQQRLSKQANDNNNSNFPWTAATKYHLNGRDSLVNPGPAMASHKDDEEKFFPMHGTLIFGKQGTNANDADLDNVMITDEEEIRTTNPVATEQYGTVSNNLQNSNTGPTTGTVNHQGALPGMVWQDRDVYLQGPIWAKIPHTDGHFHPSPLMGGFGLKHPPPQIMIKNTPVPANPPTNFSSAKFASFITQYSTGQVSVEIEWELQKENSKRWNPEIQYTSNYNKSVNVDFTVDTNGVYSEPRPIGTRYLTRNL

SEQ ID NO: 12863 - protein, 735 aa, Artificial Sequence
  source: /note="Description of Artificial Sequence: Synthetic polypeptide"
MAADGYLPDWLEDTLSEGIRQWWKLKPGPPPPKPAERHKDDSRGPVLPGYKYLGPFNGLDKGEPVNEADAAALEHDKAYDRQLDSGDNPYLKYNHADAEFQERLKEDTSFGGNLGRAVFQAKKRVLEPLGLVEEPVKTAPGKKRPVEHSPVEPDSSSGTGKAGQQPARKRLNFGQTGDADSVPDPQPLGQPPAAPTSLGSTTMATGSGAPMADNNEGADGVGNSSGNWHCDSQWLGDRVITTSTRTWALPTYNNHLYKQISSQSGASNDNHYFGHSTPWGYFDFNRFHCHFSPRDWQRLINNNWGFRPKRLNFKLFNIQVKEVTQNDGTTTIANNLTSTVQVFTDSEYQLPYVLGSAHQGCLPPFPADVFMVPQYGYLTLNNGSQAVGRSSFYCLEYFPSQMLRTGNNFTFSYTFEDVPFHSSYAHSQSLDRLMNPLIDQYLYYLNKTQSNSGTLQQSRLLFSQAGPTSMSLQAKNWLPGPCYRQQRLSKQANDNNNSNFPWTAATKYHLNGRDSLVNPGPAMASHKDDEEKFFPMHGTLIFGKQGTNANDADLDNVMITDEEEIRTTNPVATEQYGTVSNNLQNSNTGPTTGTVNHQGALPGMVWQDRDVYLQGPIWAKIPHTDGHFHPSPLMGGFGLKHPPPQIMIKNTPVPANPPTNFSSAKFASFITQYSTGQVSVEIEWELQKENSKRWNPEIQYTSNYNKSVNVDFTVDTNGVYSEPRPIGTRYLTRNL

SEQ ID NO: 12864 - protein, 735 aa, Artificial Sequence
  source: /note="Description of Artificial Sequence: Synthetic polypeptide"
MAADGYLPDWLEDTLSEGIRQWWKLKPGPPPPKPAERHKDDSRGLVLPGYKYLGPFNGLDKGEPVNEAGAAALEHDKAYDRQLDSGDNPYLKYNHADAEFQERLKEDTSFGGNLGRAVFQAKKRVLEPLGLVEEPVKTAPGKKRPVEHSPVEPDSSSGTGKAGQQPARKRLNFGQTGDADSVPDPQPLGQPPAAPTSLGSTTMATGSGAPMADNNEGADGVGNSSGNWHCDSQWLGDRVITTSTRTWALPTYNNHLYKQISSQSGASNDNHYFGHSTPWGYFDFNRFHCHFSPRDWQRLINNNWGFRPKRLNFKLFNIQVKEVTQNDGTTTIANNLTSTVQVFTDSEYQLPYVLGSAHQGCLPPFPADVFMVPQYGYLTLNNGSQAVGRSSFYCLEYFPSQMLRTGNNFTFSYTFEDVPFHSSYAHSQSLDRLMNPLIDQYLYYLNKTQSNSGTLQQSRLLFSQAGPTSMSLQAKNWLPGPCYRQQRLSKQANDNNNSNFPWTAATKYHLNGRDSLVNPGPAMASHKDDEEKFFPMHGTLIFGKQGTNANDADLDNVMITDEEEIRTTNPVATEQYGTVSNNLQNSNTGPTTGTVNHQGALPGMVWQDRDVYLQGPIWAKIPHTDGHFHPSPLMGGFGLKHPPPQIMIKNTPVPANPPTNFSSAKFASFITQYSTGQVSVEIEWELQKENSKRWNPEIQYTSNYNKSVNVDFTVDTNGVYSEPRPIGTRYLTRNL

SEQ ID NO: 12865 - protein, 735 aa, Artificial Sequence
  source: /note="Description of Artificial Sequence: Synthetic polypeptide"
MAADGYLPDWLEDTLSEGIRQWWKLKPGPPPPKPAERHKDDSRGLVLPGYKYLGPFNGLDKGEPVNGADAAALEHDKAYDRQLDSGDNPYLKYNHADAEFQERLKEDTSFGGNLGRAVFQAKKRVLEPLGLVEEPVKTAPGKKRPVEHSPVEPDSSSGTGKAGQQPARKRLNFGQTGDADSVPDPQPLGQPPAAPTSLGSTTMATGSGAPMADNNEGADGVGNSSGNWHCDSQWLGDRVITTSTRTWALPTYNNHLYKQISSQSGASNDNHYFGHSTPWGYFDFNRFHCHFSPRDWQRLINNNWGFRPKRLNFKLFNIQVKEVTQNDGTTTIANNLTSTVQVFTDSEYQLPYVLGSAHQGCLPPFPADVFMVPQYGYLTLNNGSQAVGRSSFYCLEYFPSQMLRTGNNFTFSYTFEDVPFHSSYAHSQSLDRLMNPLIDQYLYYLNKTQSNSGTLQQSRLLFSQAGPTSMSLQAKNWLPGPCYRQQRLSKQANDNNNSNFPWTAATKYHLNGRDSLVNPGPAMASHKDDEEKFFPMHGTLIFGKQGTNANDADLDNVMITDEEEIRTTNPVATEQYGTVSNNLQNSNTGPTTGTVNHQGALPGMVWQDRDVYLQGPIWAKIPHTDGHFHPSPLMGGFGLKHPPPQIMIKNTPVPANPPTNFSSAKFASFITQYSTGQVSVEIEWELQKENSKRWNPEIQYTSNYNKSVNVDFTVDTNGVYSEPRPIGTRYLTRNL

SEQ ID NO: 12866 - protein, 735 aa, Artificial Sequence
  source: /note="Description of Artificial Sequence: Synthetic polypeptide"
MAADGYLPDWLEDTLSEGIRQWWKLKPGPPPPKPAERHKDDSRGLVLPGYKYLGPFNGLDKGEPVNEADAAALEHDKAYDRQLDSGDNPYLKYNHADAEFQERLKEDTSFGGNLGRAVFQAKKRVLEPLGLVEEPVKTAPGKKRPVEHSPVEPDSSSGTGKAGQQPARKRLNFGQTGDADSVPDPQPLGQPPAAPTSLGSTTMATGSGAPMADNNEGADGVGNSSGNWHCDSQWLGDRVITTSTRTWALPTYNNHLYKQISSQSGASNDNHYFGHSTPWGYFDFNRFHCHFSPRDWQRLINNNWGFRPKRLNFKLFNIQVKEVTQNDGTTTIANNLTSTVQVFTDSEYQLPYVLGSAHQGCLPPFPADVFMVPQYGYLTLNNGSQAVGRSSLYCLEYFPSQMLRTGNNFTFSYTFEDVPFHSSYAHSQSLDRLMNPLIDQYLYYLNKTQSNSGTLQQSRLLFSQAGPTSMSLQAKNWLPGPCYRQQRLSKQANDNNNSNFPWTAATKYHLNGRDSLVNPGPAMASHKDDEEKFFPMHGTLIFGKQGTNANDADLDNVMITDEEEIRTTNPVATEQYGTVSNNLQNSNTGPTTGTVNHQGALPGMVWQDRDVYLQGPIWAKIPHTDGHFHPSPLMGGFGLKHPPPQIMIKNTPVPANPPTNFSSAKFASFITQYSTGQVSVEIEWELQKENSKRWNPEIQYTSNYNKSVNVDFTVDTNGVYSEPRPIGTRYLTRNL

SEQ ID NO: 12867 - protein, 735 aa, Artificial Sequence
  source: /note="Description of Artificial Sequence: Synthetic polypeptide"
MAADGYLPDWLEDTLSEGIRQWWKLKPGPPPPKPAERHKDDSRGLVLPGYKYLGPFNGLDKGEPVNEADAAALEHDKAYDRQLDSGDNPYLKYNHADAEFQERLKEDTSFGGNLGRAVFQAKKRVLEPLGLVEEPVKTAPGKKRPVEHSPVEPDSSSGTGKAGQQPARKRLNFGQTGDADSVPDPQPLGQPPAAPTSLGSTTMATGSGAPMADNNEGADGVGNSSGNWHCDSQWLGDRVITTSTRTWALPTYNNHLYKQISSQSGASNDNHYFGHSTPWGYFDFNRFHCHFSPRDWQRLINNNWGFRPKRLNFKLFNIQVKEVTQNDGTTTIANNLTSTVQVFTDSEYQLPYVLGSAHQGCLPPFPADVFMVPQYGYLTLNNGSQAVGRSSFYCLEYFPSQMLRTGNNFTSSYTFEDVPFHSSYAHSQSLDRLMNPLIDQYLYYLNKTQSNSGTLQQSRLLFSQAGPTSMSLQAKNWLPGPCYRQQRLSKQANDNNNSNFPWTAATKYHLNGRDSLVNPGPAMASHKDDEEKFFPMHGTLIFGKQGTNANDADLDNVMITDEEEIRTTNPVATEQYGTVSNNLQNSNTGPTTGTVNHQGALPGMVWQDRDVYLQGPIWAKIPHTDGHFHPSPLMGGFGLKHPPPQIMIKNTPVPANPPTNFSSAKFASFITQYSTGQVSVEIEWELQKENSKRWNPEIQYTSNYNKSVNVDFTVDTNGVYSEPRPIGTRYLTRNL

SEQ ID NO: 12868 - protein, 735 aa, Artificial Sequence
  source: /note="Description of Artificial Sequence: Synthetic polypeptide"
MAADGYLPDWLEDTLSEGIRQWWKLKPGPPPPKPAERHKDDSRGLVLPGYKYLGPFNGLDKGEPVNEADAAALEHDKAYDRQLDSGDNPYLKYNHADAEFQERLKEDTSFGGNLGRAVFQAKKRVLEPLGLVEEPVKTAPGKKRPVEHSPVEPDSSSGTGKAGQQPARKRLNFGQTGDADSVPDPQPLGQPPAAPTSLGSTTMATGSGAPMADNNEGADGVGNSSGNWHCDSQWLGDGVITTSTRTWALPTYNNHLYKQISSQSGASNDNHYFGHSTPWGYFDFNRFHCHFSPRDWQRLINNNWGFRPKRLNFKLFNIQVKEVTQNDGTTTIANNLTSTVQVFTDSEYQLPYVLGSAHQGCLPPFPADVFMVPQYGYLTLNNGSQAVGRSSFYCLEYFPSQMLRTGNNFTFSYTFEDVPFHSSYAHSQSLDRLMNPLIDQYLYYLNKTQSNSGTLQQSRLLFSQAGPTSMSLQAKNWLPGPCYRQQRLSKQANDNNNSNFPWTAATKYHLNGRDSLVNPGPAMASHKDDEEKFFPMHGTLIFGKQGTNANDADLDNVMITDEEEIRTTNPVATEQYGTVSNNLQNSNTGPTTGTVNHQGALPGMVWQDRDVYLQGPIWAKIPHTDGHFHPSPLMGGFGLKHPPPQIMIKNTPVPANPPTNFSSAKFASFITQYSTGQVSVEIEWELQKENSKRWNPEIQYTSNYNKSVNVDFTVDTNGVYSEPRPIGTRYLTRNL

SEQ ID NO: 12869 - protein, 735 aa, Artificial Sequence
  source: /note="Description of Artificial Sequence: Synthetic polypeptide"
MAADGYLPDWLEDTLSEGIRQWWKLKPGPPPPKPAERHKDDSRGLVLPGYKYLGPFNGLDKGEPVNEADAAALEHDKAYDRQLDSGDNPYLKYNHADAEFQERLKEDTSFGGNLGRAVFQAKKRVLEPLGLVEEPVKTAPGKKRPVEHSPVEPDSSSGTGKAGQQPARKRLNFGQTGDADSVPDPQPLGQPPAAPTSLGSTTMATGSGAPMADNNEGADGVGNSSGNWHCDSQWLGDRVITTSTRTWALPTYNNHLYKQISSQSGASNDNHYFGHSTPWGYFDFNRFHCHFSPRDWQRLINNNWGFRPKRLNFKLFNIQVKEVTQNDGTTTIANNLTSTVQVFTDSEYQLPYVLGSAHQGCLPPFPADVFMVPQYGYLTLNNGSQAVGRSSFYCLEYFPSQMLRTGNNFTFSYTFEDVPFHSSYAHSQSLDRLMNPLIDQYLYYLNKTQSNSGTLQQSRLLFSQAGPTSMSLQAKNWLPGPCYRQQRLSKQANDNNNSNFPWTAATKYHLNGRDSLVNPGPAMASHKDDEEKFFPMHGTLIFGKQGTNANDADLDNVMITDEEEIRTTNPVATEQYRTVSNNLQNSNTGPTTGTVNHQGALPGMVWQDRDVYLQGPIWAKIPHTDGHFHPSPLMGGFGLKHPPPQIMIKNTPVPANPPTNFSSAKFASFITQYSTGQVSVEIEWELQKENSKRWNPEIQYTSNYNKSVNVDFTVDTNGVYSEPRPIGTRYLTRNL

SEQ ID NO: 12870 - protein, 735 aa, Artificial Sequence
  source: /note="Description of Artificial Sequence: Synthetic polypeptide"
MAADGYLPDWLEDTLSEGIRQWWKLKPGPPPPKPAERHKDDSRGLVLPGYKYLGPFNGLDKGEPVNEADAAALEHDKAYDRQLDSGDNPYLKYNHADAEFQERLKEDTSFGGNLGRAVFQAKKRVLEPLGLVEEPVKTAPGKKRPVEHSPVEPDSSSGTGKAGQQPARKRLNFGQTGDADSVPDPQPLGQPPAAPTSLGSTTMATGSGAPMADNNEGADGVGNSSGNWHCDSQWLGDRVITTSTRTWALPTYNNHLYKQISSQSGASNDNHYFGHSTPWGYFDFNRFHCHFSPRDWQRLINNNWGFRPKRLNFKLFNIQVKEVTQNDGTTTIANNLTSTVRVFTDSEYQLPYVLGSAHQGCLPPFPADVFMVPQYGYLTLNNGSQAVGRSSFYCLEYFPSQMLRTGNNFTFSYTFEDVPFHSSYAHSQSLDRLMNPLIDQYLYYLNKTQSNSGTLQQSRLLFSQAGPTSMSLQAKNWLPGPCYRQQRLSKQANDNNNSNFPWTAATKYHLNGRDSLVNPGPAMASHKDDEEKFFPMHGTLIFGKQGTNANDADLDNVMITDEEEIRTTNPVATEQYGTVSNNLQNSNTGPTTGTVNHQGALPGMVWQDRDVYLQGPIWAKIPHTDGHFHPSPLMGGFGLKHPPPQIMIKNTPVPANPPTNFSSAKFASFITQYSTGQVSVEIEWELQKENSKRWNPEIQYTSNYNKSVNVDFTVDTNGVYSEPRPIGTRYLTRNL

SEQ ID NO: 12871 - protein, 735 aa, Artificial Sequence
  source: /note="Description of Artificial Sequence: Synthetic polypeptide"
MAADGYLPDWLEDTLSEGIRQWWKLKPGPPPPKPAERHKDDSRGLVLPGYKYLGPFNGLDKGEPVNEADAAALEHDKAYDRQLDSGDNPYLKYNHADAEFQERLKEDTSFGGNLGRAVFQAKKRVLEPLGLVEEPVKTAPGKKRPVEHSPVEPDSSSGTGKAGQQPARKRLNFGQTGDADSVPDPQPLGQPPAAPTSLGSTTMATGSGAPMADNNEGADGVGNSSGNWHCDSQWLGDRVITTSTRTWALPTYNNHLYKQISSQSGASNDNHYFGHSTPWGYFDFNRFHCHFSPRDWQRLINNNWGFRPKRLNFKLFNIQVKEVTQNDGTTTIANNLTSTVQVFTDSEYQLPYVLGSAHQGCLPPFPADVFMVPQYGYLTLNNGSQAVGRSSFYCLEYFPSQMLRTGNNFTFSYTFEDVPFHSSYAHSQSLDRLMNPLIDQYLYYLNKTQSNSGTLRQSRLLFSQAGPTSMSLQAKNWLPGPCYRQQRLSKQANDNNNSNFPWTAATKYHLNGRDSLVNPGPAMASHKDDEEKFFPMHGTLIFGKQGTNANDADLDNVMITDEEEIRTTNPVATEQYGTVSNNLQNSNTGPTTGTVNHQGALPGMVWQDRDVYLQGPIWAKIPHTDGHFHPSPLMGGFGLKHPPPQIMIKNTPVPANPPTNFSSAKFASFITQYSTGQVSVEIEWELQKENSKRWNPEIQYTSNYNKSVNVDFTVDTNGVYSEPRPIGTRYLTRNL

SEQ ID NO: 12872 - protein, 735 aa, Artificial Sequence
  source: /note="Description of Artificial Sequence: Synthetic polypeptide"
MAADGYLPDWLEDTLSEGIRQWWKLKPGPPPPKPAERHKDDSRGLVLPGYKYLGPFNGLDKGEPVNEADAAALEHDKAYDRQLDSGDNPYLKYNHADAEFQERLKEDTSFGGNLGRAVFQAKKRVLEPLGLVEEPVKTAPGKKRPVEHSPVEPDSSSGTGKAGQQPARKRLNFGQTGDADSVPDPQPLGQPPAAPTSLGSTTMATGSGAPMADNNEGADGVGNSSGNWHCDSQWLGDRVITTSTRTWALPTYNNHLYKQISSQSGASNDNHYFGHSTPWGYFDFNRFHCHFSPRDWQRLINNNWGFRPKRLNFKLFNIQVKEVTQNDGTTTIANNLTSTVQVFTDSEYQLPYVLGSAHQGCLPPFPADVFMVPQYGYLTLNNGSQAVGRSSFYCLEYFPSQMLRTGNNFTFSYTFEDVPFHSSYAHSQSLDRLMNPLIDQYLYYLNKTQSNSGTLQQSRLLFSQAGPTSMSLQAKNWLPGPCYRQQRLSKQANDNNNSNFPWTAATKYHLNGRDSLVNPGPAMASHKDDEEKFFPMHGTLIFGKQGTNANDADLDNVMITDEEEIRTTNPVATEQYGTVSNNLQNSNTGPTTGTVNRQGALPGMVWQDRDVYLQGPIWAKIPHTDGHFHPSPLMGGFGLKHPPPQIMIKNTPVPANPPTNFSSAKFASFITQYSTGQVSVEIEWELQKENSKRWNPEIQYTSNYNKSVNVDFTVDTNGVYSEPRPIGTRYLTRNL

SEQ ID NO: 12873 - protein, 735 aa, Artificial Sequence
  source: /note="Description of Artificial Sequence: Synthetic polypeptide"
MAADGYLPDWLEDTLSEGIRQWWKLKPGPPPPKPAERHKDDSRGLVLPGYKYLGPFNGLDKGEPVNEADAAALEHDKAYDRQLDSGDNPYLKYNHADAEFQERLKEDTSFGGNLGRAVFQAKKRVLEPLGLVEEPVKTAPGKKRPVEHSPVEPDSSSGTGKAGQQPARKRLNFGQTGDADSVPDPQPLGQPPAAPTSLGSTTMATGSGAPMADNNEGADGVGNSSGNWHCDSQWLGDRVITTSTRTWALPTYNNHLYKQISSQSGASNDNHYFGHSTPWGYFDFNRFHCHFSPRDWQRLINNNWGFRPKRLNFKLFNIQVKEVTQNDGTTTIANNLTSTVQVFTDSEYQLPYVLGSAHQGCLPPFPADVFMVPQYGYLTLNNGSQAVGRSSFYCLEYFPSQMLRTGNNFTFSYTFEDVPFHSSYAHSQSLDRLMNPLIDQYLYYLNKTQSNSGTLQQSRLLFSQAGPTSMSLQAKNWLPGPCYRQQRLSKQANDNNNGNFPWTAATKYHLNGRDSLVNPGPAMASHKDDEEKFFPMHGTLIFGKQGTNANDADLDNVMITDEEEIRTTNPVATEQYGTVSNNLQNSNTGPTTGTVNHQGALPGMVWQDRDVYLQGPIWAKIPHTDGHFHPSPLMGGFGLKHPPPQIMIKNTPVPANPPTNFSSAKFASFITQYSTGQVSVEIEWELQKENSKRWNPEIQYTSNYNKSVNVDFTVDTNGVYSEPRPIGTRYLTRNL

SEQ ID NO: 12874 - protein, 735 aa, Artificial Sequence
  source: /note="Description of Artificial Sequence: Synthetic polypeptide"
MAADGYLPDWLEDTLSEGIRQWWKLKPGPPPPKPAERHKDDSRGLVLPGYKYLGPFNGLDKGEPVNEADAAALEHDKAYDRQLDSGDNPYLKYNHADAEFQERLKEDTSFGGNLGRAVFQAKKRVLEPLGLVEEPVKTAPGKKRPVEHSPVEPDSSSGTGKAGQQPARKRLNFGQTGDADSVPDPQPLGQPPAAPTSLGSTTMATGSGAPMADNNEGADGVGNSSGNWHCDSQWLGDRVITTSTRTWALPTYNNHLYKQISSQSGASNDNHYFGHSTPWGYFDFNRFHCHFSPRDWQRLINNNWGFRPKRLNFKLFNIQVKEVTQNDGTTTIANNLTSTVQVFTDSEYQLPYVLGSAHQGCLPPFPADVFMVPQYGYLTLNNGSQAVGRSSFYCLEYFPSQMLRTGNNFTFSYTFEDVPFHSSYAHSQSLDRLMNPLIDQYLYYLNKTQSNSGTLQQSRLLFSQAGPTSMSLQAKNWLPGPCYRQQRLSKQANDNNNSNFPWTAATKYHLNGRDSLVNPGPAMASHKDDEEKFFPMHGTLIFGKQGTNANDADLDNVMITDEEEIRTTNPVATEQYGTVSNNLQNSNTGPTTGTVNHQGALPGMVWQDRDVYLQGPIWAKIPHTDGHFHPSPLMGGFGLKHPPPQIMIKNTPVPANPPTNFSSAKFASFITQYSTGQVSVEIEWELQKENGKRWNPEIQYTSNYNKSVNVDFTVDTNGVYSEPRPIGTRYLTRNL

SEQ ID NO: 12875 - protein, 735 aa, Artificial Sequence
  source: /note="Description of Artificial Sequence: Synthetic polypeptide"
MAADGYLPDWLEDALSEGIRQWWKLKPGPPPPKPAERHKDDSRGLVLPGYKYLGPFNGLDKGEPVNEADAAALEHDKAYDRQLDSGDNPYLKYNHADAEFQERLKEDTSFGGNLGRAVFQAKKRVLEPLGLVEEPVKTAPGKKRPVEHSPVEPDSSSGTGKAGQQPARKRLNFGQTGDADSVPDPQPLGQPPAAPTSLGSTTMATGSGAPMADNNEGADGVGNSSGNWHCDSQWLGDRVITTSTRTWALPTYNNHLYKQISSQSGASNDNHYFGHSTPWGYFDFNRFHCHFSPRDWQRLINNNWGFRPKRLNFKLFNIQVKEVTQNDGTTTIANNLTSTVQVFTDSEYQLPYVLGSAHQGCLPPFPADVFMVPQYGYLTLNNGSQAVGRSSFYCLEYFPSQMLRTGNNFTFSYTFEDVPFHSSYAHSQSLDRLMNPLIDQYLYYLNKTQSNSGTLQQSRLLFSQAGPTSMSLQAKNWLPGPCYRQQRLSKQANDNNNSNFPWTAATKYHLNGRDSLVNPGPAMASHKDDEEKFFPMHGTLIFGKQGTNANDADLDNVMITDEEEIRTTNPVATEQYGTVSNNLQNSNTGPTTGTVNHQGALPGMVWQDRDVYLQGPIWAKIPHTDGHFHPSPLMGGFGLKHPPPQIMIKNTPVPANPPTNFSSAKFASFITQYSTGQVSVEIEWELQKENSKRWNPEIQYTSNYNKSVNVDFTVDTNGVYSEPRPIGTRYLTRNL

SEQ ID NO: 12876 - protein, 735 aa, Artificial Sequence
  source: /note="Description of Artificial Sequence: Synthetic polypeptide"
MAADGYLPDWLEDTLSEGIRQWWKLKPGPPPPKPAERHKDDSRGLVLPGYKYLGPFNGLDKGEPVNEADAAALEHDKAYDRQLDSGDNPYLKYNHADAEFQERLKEDTPFGGNLGRAVFQAKKRVLEPLGLVEEPVKTAPGKKRPVEHSPVEPDSSSGTGKAGQQPARKRLNFGQTGDADSVPDPQPLGQPPAAPTSLGSTTMATGSGAPMADNNEGADGVGNSSGNWHCDSQWLGDRVITTSTRTWALPTYNNHLYKQISSQSGASNDNHYFGHSTPWGYFDFNRFHCHFSPRDWQRLINNNWGFRPKRLNFKLFNIQVKEVTQNDGTTTIANNLTSTVQVFTDSEYQLPYVLGSAHQGCLPPFPADVFMVPQYGYLTLNNGSQAVGRSSFYCLEYFPSQMLRTGNNFTFSYTFEDVPFHSSYAHSQSLDRLMNPLIDQYLYYLNKTQSNSGTLQQSRLLFSQAGPTSMSLQAKNWLPGPCYRQQRLSKQANDNNNSNFPWTAATKYHLNGRDSLVNPGPAMASHKDDEEKFFPMHGTLIFGKQGTNANDADLDNVMITDEEEIRTTNPVATEQYGTVSNNLQNSNTGPTTGTVNHQGALPGMVWQDRDVYLQGPIWAKIPHTDGHFHPSPLMGGFGLKHPPPQIMIKNTPVPANPPTNFSSAKFASFITQYSTGQVSVEIEWELQKENSKRWNPEIQYTSNYNKSVNVDFTVDTNGVYSEPRPIGTRYLTRNL

SEQ ID NO: 12877 - DNA, 2205 bp, Artificial Sequence
  source: /note="Description of Artificial Sequence: Synthetic polynucleotide"
atggctgccgatggttatcttccagattggctcgaggacactctctctgaaggaataagacagtggtggaagctcaaacctggcccaccaccgccaaagcccgcagagcggcacaaggacgacagtaggggtcttgtgcttcctgggtacaagtacctcggacccttcaacggactcgacaaaggagagccggtcaacgaggcagacgccgcggccctcgagcacgacaaggcctacgaccggcagctcgacagcggagacaacccgtacctcaagtacaaccacgccgacgcggagtttcaggagcgtcttaaagaagatacgtcttttgggggcaacctcggacgagcagtattccaggcgaaaaagagggttcttgaacctctgggcctggttgaggagcctgttaagacggctccgggaaaaaagaggccggtagagcactctcctgtggagccagactcctcctcgggaaccggaaaggcgggccagcagcctgcaagaaaaagattgaattttggtcagactggagacgcagactcagtacctgacccccagcctctcggacagccaccagcagccccctctggtctgggaactaatacgatggctacaggcagtggcgcaccaatggcagacaataacgagggcgccgacggagtgggtaattcctcgggaaattggcattgcgattccacatggatgggcgacagagtcatcaccaccagcacccgaacctgggccctgcccacctacaacaaccacctctacaaacaaatttccagccaatcaggagcctcgaacgacaatcactactttggctacagcaccccttgggggtattttgacttcaacagattccactgccacttttcaccacgtgactggcaaagactcatcaacaacaactggggattccgacccaagagactcaacttcaagctctttaacattcaagtcaaagaggtcacgcagaatgacggtacgacgacgattgccaataaccttaccagcacggttcaggtgtttactgactcggagtaccagctcccgtacgtcctcggctcggcgcatcaaggatgcctcccgccgttcccagcagacgtcttcatggtgccacagtatggatacctcaccctgaacaacgggagtcaggcagtaggacgctcttcattttactgcctggagtactttccttctcagatgctgcgtaccggaaacaactttaccttcagctacacttttgaggacgttcctttccacagcagctacgctcacagccagagtctggaccgtctcatgaatcctctcatcgaccagtacctgtattacttgagcagaacacactccaatagtggaactcaccagcagtcaaggcttcagttttctcaggccggagcgagcatgtcgggaccagctaggaactggcttcctggaccctgttaccgccagcagcgagtatcaaagcagtctgcggataacaacaacagtgaatactcgtggactggagctaccaagtaccacctcaatggcagagactctctggtgaatccgggcccggccatggcaagccacaaggacgatgaagaaaagtttttcctcatgagcggggttctcatctttgggaagcaaggctcagatgaaaacaatgtggacattgaaaaggtcatgattacagacgaagaggaaatcaggacaaccaatcccgtggctacggagcagtatggttctgtatctaccaacctccaagaggcaaagacaagtccagctaccgcagatgtcaatcaccaaggcgttcttccaggcatggtctggcaggacagagatgtgtaccttcaggggcccatctgggcaaagattccacacacggacggacattttcacccctctcccctcatgggtggattcggacttaaacaccctcctccacagattctcatcaagaacaccccggtacctgcgaatccttcgaccaccttcagtgcggcaaagtttgcttccttcatcacacagtactccacgggacaggccagcgtggagatcgagtgggagctgcagaaggaaaacagcaaacgctggaatcccgaaattcagtacacttccaactacaacaagtctgttaatgtggactttactgtggacactaatggcgtgtattcagagcctcgccccattggcaccagatacctgactcgtaatctgtaa

SEQ ID NO: 12878 - DNA, 2205 bp, Artificial Sequence
  source: /note="Description of Artificial Sequence: Synthetic polynucleotide"
atggctgccgatggttatcttccagattggctcgaggacactctctctgaaggaataagacagtggtggaagctcaaacctggcccaccaccgccaaagcccgcagagcggcacaaggacgacagtaggggtcttgtgcttcctgggtacaagtacctcggacccttcaacggactcgacaaaggagagccggtcaacgaggcagacgccgcggccctcgagcacgacaaggcctacgaccggcagctcgacagcggagacaacccgtacctcaagtacaaccacgccgacgcggagtttcaggagcgtcttaaagaagatacgtcttttgggggcaacctcggacgagcagtattccaggcgaaaaagagggttcttgaacctctgggcctggttgaggagcctgttaagacggctccgggaaaaaagaggccggtagagcactctcctgtggagccagactcctcctcgggaaccggaaaagcgggccagcagcctgcaagaaaaagattgaattttggtcagactggagacgcagactccgtacctgacccccagcctctcggacagccaccagcagcccccacaagtttgggatctactacaatggctacaggcagtggcgcaccaatggcagacaataacgagggtgccgatggagtgggtaattcctcaggaaattggcattgcgattcccaatggctgggcgacagagtcatcaccaccagcacccgaacctgggccctgcccacctacaacaaccacctctacaagcaaatctccagccaatcaggagcatcgaacgacaaccactactttggccacagcaccccttgggggtattttgacttcaacagattccactgtcacttctccccacgtgactggcaaagactcatcaacaacaactggggattccgacccaagagactcaacttcaagctctttaacattcaagtcaaagaggtcacgcagaatgacggtacgacgacgattgccaataaccttaccagcacggttcaggtgtttactgactcggagtaccagctcccgtacgtcctcggctcggcgcatcaaggatgcctcccgccgttcccagcagacgtcttcatggtgccacagtatggatacctcaccctgaacaacgggagtcaggcagtaggacgctcttcattttactgcctggagtacttcccttctcagatgctgcgtaccggaaacaactttaccttcagctacacttttgaggacgttcctttccacagcagctacgctcacagccagagtctggaccgtctcatgaatcctctcatcgaccagtacctgtattacttgagcagaacacactccaatagtggaactcaccagcagtcaaggcttcagttttctcaggccggagcgagcatgtcgggaccagctaggaactggcttcctggaccctgttaccgccagcagcgagtatcaaagcagtctgcggataacaacaacagtgaatactcgtggactggagctaccaagtaccgcctcaatggcagagactctctggtgaatccgggctcggccatggcaagccacaaggacgatgaagaaaagtttttcctcatgagcggggttctcatctttgggaagcaaggctcagatgaaaacaatgtggacattgaaaaggtcatgattacagacgaagaggaaatcaggacaaccaatcccgtggctacggagcagtatggttctgtatctaccaacctccaagaggcaaagacaagtccagctaccgcagatgtcaatcaccaaggcgttcttccaggcatggtctggcaggacagagatgtgtaccttcaggggcccatctgggcaaagattccacacacggacggacattttcacccctctcccctcatgggtggattcggacttaaacaccctcctccacagattctcatcaagaacaccccggtacctgcgaatccttcgaccaccttcagtgcggcaaagtttgcttccttcatcacacagtactccacgggacaggtcagcgtggagatcgagtgggagctgcagaaggaaaacagcaaacgctggaatcccgaaattcagtacacttccaactacaacaagtctgttaatgtggactttactgtggacactaatggcgtgtattcagagcctcgccccattggcaccagatacctgactcgtaatctgtaa

SEQ ID NO: 12879 - DNA, 2205 bp, Artificial Sequence
  source: /note="Description of Artificial Sequence: Synthetic polynucleotide"
atggctgccgatggttatcttccagattggctcgaggacactctctctgaaggaataagacagtggtggaagctcaaacctggcccaccaccgccaaagcccgcagagcggcacaaggacgacagtaggggtcttgtgcttcctgggtacaagtacctcggacccttcaacggactcgacaaaggagagccggtcaacgaggcagacgccgcggccctcgagcacgacaaggcctacgaccggcagctcgacagcggagacaacccgtacctcaagtacaaccacgccgacgcggagtttcaggagcgtcttaaagaagatacgtcttttgggggcaacctcggacgagcagtattccaggcgaaaaagagggttcttgaacctctgggcctggttgaggagcctgttaagacggctccgggaaaaaagaggccggtagagcactctcctgtggagccagactcctcctcgggaaccggaaaggcgggccagcagcctgcaagaaaaagattgaattttggtcagactggagacgcagactcagtacctgacccccagcctctcggacagccaccagcagccccctctggtctgggaactaatacgatggctacaggcagtggcgcaccaatggcagacaataacgagggcgccgacggagtgggtaattcctcgggaaattggcattgcgattccacatggatgggcgacagagtcatcaccaccagcacccgaacctgggccctgcccacctacaacaaccacctctacaaacaaatttccagccaatcaggagcctcgaacgacaatcactactttggctacagcaccccttgggggtattttgacttcaacagattccactgccacttttcaccacgtgactggcaaagactcatcaacaacaactggggattccgacccaagagactcaacttcaagctctttaacattcaagtcaaagaggtcacgcagaatgacggtacgacgacgattgccaataaccttaccagcacggttcaggtgtttactgactcggagtaccagctcccgtacgtcctcggctcggcgcatcaaggatgcctcccgccgttcccagcagacgtcttcatggtgccacagtatggatacctcaccctgaacaacgggagtcaggcagtaggacgctcttcattttactgcctggagtacttcccttctcagatgctgcgtaccggaaacaactttaccttcagctacacttttgaggacgttcctttccacagcagctacgctcacagccagagtctggaccgtctcatgaatcctctcatcgaccagtacctgtattacttgagcagaacacactccaatagtggaactcaccagcagtcaaggcttcagttttctcaggccggagcgagcatgtcgggaccagctaggaactggcttcctggaccctgttaccgccagcagcgagtatcaaagcagtctgcggataacaacaacagtgaatactcgtggactggagctaccaagtaccgcctcaatggcagagactctctggtgaatccgggctcggccatggcaagccacaaggacgatgaagaaaagtttttcctcatgagcggggttctcatctttgggaagcaaggctcagatgaaaacaatgtggacattgaaaaggtcatgattacagacgaagaggaaatcaggacaaccaatcccgtggctacggagcagtatggttctgtatctaccaacctccaagaggcaaagacaagtccagctaccgcagatgtcaatcaccaaggcgttcttccaggcatggtctggcaggacagagatgtgtaccttcaggggcccatctgggcaaagattccacacacggacggacattttcacccctctcccctcatgggtggattcggacttaaacaccctcctccacagattctcatcaagaacaccccggtacctgcgaatccttcgaccaccttcagtgcggcaaagtttgcttccttcatcacacagtactccacgggacaggtcagcgtggagatcgagtgggagctgcagaaggaaaacagcaaacgctggaatcccgaaattcagtacacttccaactacaacaagtctgttaatgtggactttactgtggacactaatggcgtgtattcagagcctcgccccattggcaccagatacctgactcgtaatctgtaa

SEQ ID NO: 12880 - DNA, 2205 bp, Artificial Sequence
  source: /note="Description of Artificial Sequence: Synthetic polynucleotide"
atggctgccgatggttatcttccagattggctcgaggacactctctctgaaggaataagacagtggtggaagctcaaacctggcccaccaccgccaaagcccgcagagcggcacaaggacgacagtaggggtcttgtgcttcctgggtacaagtacctcggacccttcaacggactcgacaaaggagagccggtcaacgaggcagacgccgcggccctcgagcacgacaaggcctacgaccggcagctcgacagcggagacaacccgtacctcaagtacaaccacgccgacgcggagtttcaggagcgtcttaaagaagatacgtcttttgggggcaacctcggacgagcagtattccaggcgaaaaagagggttcttgaacctctgggcctggttgaggagcctgttaagacggctccgggaaaaaagaggccggtagagcactctcctgtggagccagactcctcctcgggaaccggaaaagcgggccagcagcctgcaagaaaaagattgaattttggtcagactggagacgcagactccgtacctgacccccagcctctcggacagccaccagcagcccccacaagtttgggatctactacaatggctacaggcagtggcgcaccaatggcagacaataacgagggtgccgatggagtgggtaattcctcaggaaattggcattgcgattcccaatggctgggcgacagagtcatcaccaccagcacccgaacctgggccctgcccacctacaacaaccacctctacaagcaaatctccagccaatcaggagcatcgaacgacaaccactactttggccacagcaccccttgggggtattttgacttcaacagattccactgtcacttctccccacgtgactggcaaagactcatcaacaacaactggggattccgacccaagagactcaacttcaagctctttaacattcaagtcaaagaggtcacgcagaatgacggtacgacgacgattgccaataaccttaccagcacggttcaggtgtttactgactcggagtaccagctcccgtacgtcctcggctcggcgcatcaaggatgcctcccgccgttcccagcagacgtcttcatggtgccacagtatggatacctcaccctgaacaacgggagtcaggcagtaggacgctcttcattttactgcctggagtactttccttctcagatgctgcgtaccggaaacaactttaccttcagctacacttttgaggacgttcctttccacagcagctacgctcacagccagagtctggaccgtctcatgaatcctctcatcgaccagtacctgtattacttgagcagaacacactccaatagtggaactcaccagcagtcaaggcttcagttttctcaggccggagcgagcatgtcgggaccagctaggaactggcttcctggaccctgttaccgccagcagcgagtatcaaagcagtctgcggataacaacaacagtgaatactcgtggactggagctaccaagtaccacctcaatggcagagactctctggtgaatccgggcccggccatggcaagccacaaggacgatgaagaaaagtttttcctcatgagcggggttctcatctttgggaagcaaggctcagatgaaaacaatgtggacattgaaaaggtcatgattacagacgaagaggaaatcaggacaaccaatcccgtggctacggagcagtatggttctgtatctaccaacctccaagaggcaaagacaagtccagctaccgcagatgtcaatcaccaaggcgttcttccaggcatggtctggcaggacagagatgtgtaccttcaggggcccatctgggcaaagattccacacacggacggacattttcacccctctcccctcatgggtggattcggacttaaacaccctcctccacagattctcatcaagaacaccccggtacctgcgaatccttcgaccaccttcagtgcggcaaagtttgcttccttcatcacacagtactccacgggacaggccagcgtggagatcgagtgggagctgcagaaggaaaacagcaaacgctggaatcccgaaattcagtacacttccaactacaacaagtctgttaatgtggactttactgtggacactaatggcgtgtattcagagcctcgccccattggcaccagatacctgactcgtaatctgtaa

SEQ ID NO: 12881 - DNA, 2205 bp, Artificial Sequence
  source: /note="Description of Artificial Sequence: Synthetic polynucleotide"
atggctgccgatggttatcttccagattggctcgaggacactctctctgaaggaataagacagtggtggaagctcaaacctggcccaccaccgccaaagcccgcagagcggcacaaggacgacagtaggggtcttgtgcttcctgggtacaagtacctcggacccttcaacggactcgacaaaggagagccggtcaacgaggcagacgccgcggccctcgagcacgacaaggcctacgaccggcagctcgacagcggagacaacccgtacctcaagtacaaccacgccgacgcggagtttcaggagcgtcttaaagaagatacgtcttttgggggcaacctcggacgagcagtattccaggcgaaaaagagggttcttgaacctctgggcctggttgaggagcctgttaagacggctccgggaaaaaagaggccggtagagcactctcctgtggagccagactcctcctcgggaaccggaaaagcgggccagcagcctgcaagaaaaagattgaattttggtcagactggagacgcagactccgtacctgacccccagcctctcggacagccaccagcagcccccacaagtttgggatctactacaatggctacaggcagtggcgcaccaatggcagacaataacgagggtgccgatggagtgggtaattcctcaggaaattggcattgcgattcccaatggctgggcgacagagtcatcaccaccagcacccgaacctgggccctgcccacctacaacaaccacctctacaagcaaatctccagccaatcaggagcatcgaacgacaaccactactttggctacagcaccccttgggggtattttgacttcaacagattccactgtcacttctccccacgtgactggcaaagactcatcaacaacaactggggattccgacccaagagactcaacttcaagctctttaacattcaagtcaaagaggtcacgcagaatgacggtacgacgacgattgccaataaccttaccagcacggttcaggtgtttactgactcggagtaccagctcccgtacgtcctcggctcggcgcatcaaggatgcctcccgccgttcccagcagacgtcttcatggtgccacagtatggatacctcaccctgaacaacgggagtcaggcagtaggacgctcttcattttactgcctggagtacttcccttctcagatgctgcgtaccggaaacaactttaccttcagctacacttttgaggacgttcctttccacagcagctacgctcacagccagagtctggaccgtctcatgaatcctctcatcgaccagtacctgtattacttgagcagaacacactccaatagtggaactcaccagcagtcaaggcttcagttttctcaggccggagcgagcatgtcgggaccagctaggaactggcttcctggaccctgttaccgccagcagcgagtatcaaagcagtctgcggataacaacaacagtgaatactcgtggactggagctaccaagtaccgcctcaatggcagagactctctggtgaatccgggctcggccatggcaagccacaaggacgatgaagaaaagtttttcctcatgagcggggttctcatctttgggaagcaaggctcagatgaaaacaatgtggacattgaaaaggtcatgattacagacgaagaggaaatcaggacaaccaatcccgtggctacggagcagtatggttctgtatctaccaacctccaagaggcaaagacaagtccagctaccgcagatgtcaatcaccaaggcgttcttccaggcatggtctggcaggacagagatgtgtaccttcaggggcccatctgggcaaagattccacacacggacggacattttcacccctctcccctcatgggtggattcggacttaaacaccctcctccacagattctcatcaagaacaccccggtacctgcgaatccttcgaccaccttcagtgcggcaaagtttgcttccttcatcacacagtactccacgggacaggtcagcgtggagatcgagtgggagctgcagaaggaaaacagcaaacgctggaatcccgaaattcagtacacttccaactacaacaagtctgttaatgtggactttactgtggacactaatggcgtgtattcagagcctcgccccattggcaccagatacctgactcgtaatctgtaa

SEQ ID NO: 12882 - DNA, 2205 bp, Artificial Sequence
  source: /note="Description of Artificial Sequence: Synthetic polynucleotide"
atggctgccgatggttatcttccagattggctcgaggacactctctctgaaggaataagacagtggtggaagctcaaacctggcccaccaccgccaaagcccgcagagcggcacaaggacgacagtaggggtcttgtgcttcctgggtacaagtacctcggacccttcaacggactcgacaaaggagagccggtcaacgaggcagacgccgcggccctcgagcacgacaaggcctacgaccggcagctcgacagcggagacaacccgtacctcaagtacaaccacgccgacgcggagtttcaggagcgtcttaaagaagatacgtcttttgggggcaacctcggacgagcagtattccaggcgaaaaagagggttcttgaacctctgggcctggttgaggaacctgttaagacggctccgggaaaaaagaggccggtagagcactctcctgtggagccagactcctcctcgggaaccggaaaggcgggccagcagcctgcaagaaaaagattgaattttggtcagactggagacgcagactcagtacctgacccccagcctctcggacagccaccagcagccccctctggtctgggaactaatacgatggctacaggcagtggcgcaccaatggcagacaataacgagggcgccgacggagtgggtaattcctcgggaaattggcattgcgattccacatggatgggcgacagagtcatcaccaccagcacccgaacctgggccctgcccacctacaacaaccacctctacaaacaaatttccagccaatcaggagcctcgaacgacaatcactactttggctacagcaccccttgggggtattttgacttcaacagattccactgccacttttcaccacgtgactggcaaagactcatcaacaacaactggggattccgacccaagagactcaacttcaagctctttaacattcaagtcaaagaggtcacgcagaatgacggtacgacgacgattgccaataaccttaccagcacggttcaggtgtttactgactcggagtaccagctcccgtacgtcctcggctcggcgcatcaaggatgcctcccgccgttcccagcagacgtcttcatggtgccacagtatggatacctcaccctgaacaacgggagtcaggcagtaggacgctcttcattttactgcctggagtacttcccttctcagatgctgcgtaccggaaacaactttaccttcagctacacttttgaggacgttcctttccacagcagctacgctcacagccagagtctggaccgtctcatgaatcctctcatcgaccagtacctgtattacttgagcagaacacactccaatagtggaactcaccagcagtcaaggcttcagttttctcaggccggagcgagcatgtcgggaccagctaggaactggcttcctggaccctgttaccgccagcagcgagtatcaaagcagtctgcggataacaacaacagtgaatactcgtggactggagctaccaagtaccgcctcaatggcagagactctctggtgaatccgggctcggccatggcaagccacaaggacgatgaagaaaagtttttcctcatgagcggggttctcatctttgggaagcaaggctcagatgaaaacaatgtggacattgaaaaggtcatgattacagacgaagaggaaatcaggacaaccaatcccgtggctacggagcagtatggttctgtatctaccaacctccaagaggcaaagacaagtccagctaccgcagatgtcaatcaccaaggcgttcttccaggcatggtctggcaggacagagatgtgtaccttcaggggcccatctgggcaaagattccacacacggacggacattttcacccctctcccctcatgggtggattcggacttaaacaccctcctccacagattctcatcaagaacaccccggtacctgcgaatccttcgaccaccttcagtgcggcaaagtttgcttccttcatcacacagtactccacgggacaggccagcgtggagatcgagtgggagctgcagaaggaaaacagcaaacgctggaatcccgaaattcagtacacttccaactacaacaagtctgttaatgtggactttactgtggacactaatggcgtgtattcagagcctcgccccattggcaccagatacctgactcgtaatctgtaa

SEQ ID NO: 12883 - DNA, 2205 bp, Artificial Sequence
  source: /note="Description of Artificial Sequence: Synthetic polynucleotide"
atggctgccgatggttatcttccagattggctcgaggacactctctctgaaggaataagacagtggtggaagctcaaacctggcccaccaccgccaaagcccgcagagcggcacaaggacgacagtaggggtcttgtgcttcctgggtacaagtacctcggacccttcaacggactcgacaaaggagagccggtcaacgaggcagacgccgcggccctcgagcacgacaaggcctacgaccggcagctcgacagcggagacaacccgtacctcaagtacaaccacgccgacgcggagtttcaggagcgtcttaaagaagatacgtcttttgggggcaacctcggacgagcagtattccaggcgaaaaagagggttcttgaacctctgggcctggttgaggagcctgttaagacggctccgggaaaaaagaggccggtagagcactctcctgtggagccagactcctcctcgggaaccggaaaagcgggccagcagcctgcaagaaaaagattgaattttggtcagactggagacgcagactccgtacctgacccccagcctctcggacagccaccagcagcccccacaagtttgggatctactacaatggctacaggcagtggcgcaccaatggcagacaataacgagggtgccgatggagtgggtaattcctcgggaaattggcattgcgattccacatggatgggcgacagagtcatcaccaccagcacccgaacctgggccctgcccacctacaacaaccacctctacaaacaaatttccagccaatcaggagcctcgaacgacaatcactactttggctacagcaccccttgggggtattttgacttcaacagattccactgccacttttcaccacgtgactggcaaagactcatcaacaacaactggggattccgacccaagagactcaacttcaagctctttaacattcaagtcaaagaggtcacgcagaatgacggtacgacgacgattgccaataaccttaccagcacggttcaggtgtttactgactcggagtaccagctcccgtacgtcctcggctcggcgcatcaaggatgcctcccgccgttcccagcagacgtcttcatggtgccacagtatggatacctcaccctgaacaacgggagtcaggcagtaggacgctcttcattttactgcctggagtacttcccttctcagatgctgcgtaccggaaacaactttaccttcagctacacttttgaggacgttcctttccacagcagctacgctcacagccagagtctggaccgtctcatgaatcctctcatcgaccagtacctgtattacttgagcagaacacactccaatagtggaactcaccagcagtcaaggcttcagttttctcaggccggagcgagcatgtcgggaccagctaggaactggcttcctggaccctgttaccgccagcagcgagtatcaaagcagtctgcggataacaacaacagtgaatactcgtggactggagctaccaagtaccgcctcaatggcagagactctctggtgaatccgggctcggccatggcaagccacaaggacgatgaagaaaagtttttcctcatgagcggggttctcatctttgggaagcaaggctcagatgaaaacaatgtggacattgaaaaggtcatgattacagacgaagaggaaatcaggacaaccaatcccgtggctacggagcagtatggttctgtatctaccaacctccaagaggcaaagacaagtccagctaccgcagatgtcaatcaccaaggcgttcttccaggcatggtctggcaggacagagatgtgtaccttcaggggcccatctgggcaaagattccacacacggacggacattttcacccctctcccctcatgggtggattcggacttaaacaccctcctccacagattctcatcaagaacaccccggtacctgcgaatccttcgaccaccttcagtgcggcaaagtttgcttccttcatcacacagtactccacgggacaggtcagcgtggagatcgagtgggagctgcagaaggaaaacagcaaacgctggaatcccgaaattcagtacacttccaactacaacaagtctgttaatgtggactttactgtggacactaatggcgtgtattcagagcctcgccccattggcaccagatacctgactcgtaatctgtaa

SEQ ID NO: 12884 - DNA, 2205 bp, Artificial Sequence
  source: /note="Description of Artificial Sequence: Synthetic polynucleotide"
atggctgccgatggttatcttccagattggctcgaggacactctctctgaaggaataagacagtggtggaagctcaaacctggcccaccaccaccaaagcccgcagagcggcataaggacgacagcaggggtcttgtgcttcctgggtacaagtacctcggacccttcaacggactcgacaagggagagccggtcaacgaggcagacgccgcggccctcgagcacgacaaagcctacgaccggcagctcgacagcggagacaacccgtacctcaagtacaaccacgccgacgcggagtttcaggagcgccttaaagaagatacgtcttttgggggcaacctcggacgagcagtcttccaggcgaaaaagagggttcttgaacctctgggcctggttgaggaacctgttaagacggctccgggaaaaaagaggccggtagagcactctcctgtggagccagactcctcctcgggaaccggaaaggcgggccagcagcctgcaagaaaaagattgaattttggtcagactggagacgcagactcagtacctgacccccagcctctcggacagccaccagcagccccctctggtctgggaactaatacgatggctacaggcagtggcgcaccaatggcagacaataacgagggcgccgacggagtgggtaattcctcgggaaattggcattgcgattccacatggatgggcgacagagtcatcaccaccagcacccgaacctgggccctgcccacctacaacaaccacctctacaaacaaatttccagccaatcaggagcctcgaacgacaatcactactttggctacagcaccccttgggggtattttgacttcaacagattccactgccacttttcaccacgtgactggcaaagactcatcaacaacaactggggattccgacccaagagactcaacttcaagctctttaacattcaagtcaaagaggtcacgcagaatggcggtacgacgacgattgccaataaccttaccagcacggttcaggtgtttactgactcggagtaccagctcccgtacgtcctcggctcggcgcatcaaggatgcctcccgccgttcccagcagacgtcttcatggtgccacagtatggatacctcaccctgaacaacgggagtcaggcagtaggacgctcttcattttactgcctggagtacttcccttctcagatgctgcgtaccggaaacaactttaccttcagctacacttttgaggacgttcctttccacagcagctacgctcacagccagagtctggaccgtctcatgaatcctctcatcgaccagtacctgtattacttgagcagaacacactccaatagtggaactcaccagcagtcaaggcttcagttttctcaggccggagcgagcatgtcgggaccagctaggaactggcttcctggaccctgttaccgccagcagcgagtatcaaagcagtctgcggataacaacaacagtgaatactcgtggactggagctaccaagtaccgcctcaatggcagagactctctggtgaatccgggctcggccatggcaagccacaaggacgatgaagaaaagtttttcctcatgagcggggttctcatctttgggaagcaaggctcagatgaaaacaatgtggacattgaaaaggtcatgattacagacgaagaggaaatcaggacaaccaatcccgtggctacggagcagtatggttctgtatctaccaacctccaagaggcaaagacaagtccagctaccgcagatgtcaatcaccaaggcgttcttccaggcatggtctggcaggacagagatgtgtaccttcaggggcccatctgggcaaagattccacacacggacggacattttcacccctctcccctcatgggtggattcggacttaaacaccctcctccacagattctcatcaagaacaccccggtacctgcgaatccttcgaccaccttcagtgcggcaaagtttgcttccttcatcacacagtactccacgggacaggtcagcgtggagatcgagtgggagctgcagaaggaaaacagcaaacgctggaatcccgaaattcagtacacttccaactacaacaagtctgttaatgtggactttactgtggacactaatggcgtgtattcagagcctcgccccattggcaccagatacctgactcgtaatctgtaa

SEQ ID NO: 12885 - DNA, 2208 bp, Artificial Sequence
  source: /note="Description of Artificial Sequence: Synthetic polynucleotide"
atggctgccgatggttatcttccagattggctcgaggacactctctctgaaggaataagacagtggtggaagctcaaacctggcccaccaccaccaaagcccgcagagcggcataaggacgacagcaggggtcttgtgcttcctgggtacaagtacctcggacccttcaacggactcgacaagggagagccggtcaacgaggcagacgccgcggccctcgagcacgacaaagcctacgaccggcagctcgacagcggagacaacccgtacctcaagtacaaccacgccgacgcggagtttcaggagcgccttaaagaagatacgtcttttgggggcaacctcggacgagcagtcttccaggcgaaaaagagggttcttgaacctctgggcctggttgaggaacctgttaagacggctccgggaaaaaagaggccggtagagcactctcctgtggagccagactcctcctcgggaaccggaaaggcgggccagcagcctgcaagaaaaagattgaattttggtcagactggagacgcagactcagtacctgacccccagcctctcggacagccaccagcagccccctctggtctgggaactaatacgatggctacaggcagtggcgcaccaatggcagacaataacgagggcgccgacggagtgggtaattcctcgggaaattggcattgcgattccacatggatgggcgacagagtcatcaccaccagcacccgaacctgggccctgcccacctacaacaaccacctctacaaacaaatttccagccaatcaggagcctcgaacgacaatcactactttggctacagcaccccttgggggtattttgacttcaacagattccactgccacttttcaccacgtgactggcaaagactcatcaacaacaactggggattccgacccaggagactcaacttcaagctctttaacattcaagtcaaagaggtcacgcagaatgacggtacgacgacgattgccaataaccttaccagcacggttcaggtgtttactgactcggagtaccagctcccgtacgtcctcggctcggcgcatcaaggatgcctcccgccgttcccagcagacgtcttcatggtgccacagtatggatacctcaccctgaacaacgggagtcaggcagtaggacgctcttcattttactgcctggagtactttccttctcagatgctgcgtaccggaaacaactttaccttcagctacacttttgaggacgttcctttccacagcagctacgctcacagccagagtctggaccgtctcatgaatcctctcatcgaccagtacctgtattacttgagcagaacaaacactccaagtggaaccaccacgcagtcaaggcttcagttttctcaggccggagcgagtgacattcgggaccagtctaggaactggcttcctggaccctgttaccgccagcagcgagtatcaaagacatctgcggataacaacaacagtgaatactcgtggactggagctaccaagtaccacctcaatggcagagactctctggtgaatccgggcccggccatggcaagccacaaggacgatgaagaaaagttttttcctcagagcggggttctcatctttgggaagcaaggctcagagaaaacaaatgtggacattgaaaaggtcatgattacagacgaagaggaaatcaggacaaccaatcccgtggctacggagcagtatggttctgtatctaccaacctccagagaggcaacagacaagcagctaccgcagatgtcaacacacaaggcgttcttccaggcatggtctggcaggacagagatgtgtaccttcaggggcccatctgggcaaagattccacacacggacggacattttcacccctctcccctcatgggtggattcggacttaaacaccctcctccacagattctcatcaagaacaccccggtacctgcgaatccttcgaccaccttcagtgcggcaaagtttgcttccttcatcacacagtactccacgggacaggtcagcgtggagatcgagtgggagctgcagaaggaaaacagcaaacgctggaatcccgaaattcagtacacttccaactacaacaagtctgttaatgtggactttactgtggacactaatggcgtgtattcagagcctcgccccattggcaccagatacctgactcgtaatctgtaa

SEQ ID NO: 12886 - DNA, 2208 bp, Artificial Sequence
  source: /note="Description of Artificial Sequence: Synthetic polynucleotide"
atggctgccgatggttatcttccagattggctcgaggacactctctctgaaggaataagacagtggtggaagctcaaacctggcccaccaccaccaaagcccgcagagcggcataaggacgacagcaggggtcttgtgcttcctgggtacaagtacctcggacccttcaacggactcgacaagggagagccggtcaacgaggcagacgccgcggccctcgagcacgacaaagcctacgaccggcagctcgacagcggagacaacccgtacctcaagtacaaccacgccgacgcggagtttcaggagcgccttaaagaagatacgtcttttgggggcaacctcggacgagcagtcttccaggcgaaaaagagggttcttgaacctctgggcctggttgaggaacctgttaagacggctccgggaaaaaagaggccggtagagcactctcctgtggagccagactcctcctcgggaaccggaaaggcgggccagcagcctgcaagaaaaagattgaattttggtcagactggagacgcagactcagtacctgacccccagcctctcggacagccaccagcagccccctctggtctgggaactaatacgatggctacaggcagtggcgcaccaatggcagacaataacgagggcgccgacggagtgggtaattcctcgggaaattggcattgcgattccacatggatgggcgacagagtcatcaccaccagcacccgaacctgggccctgcccacctacaacaaccacctctacaaacaaatttccagccaatcaggagcctcgaacgacaatcactactttggctacagcaccccttgggggtattttgacttcaacagattccactgccacttttcaccacgtgactggcaaagactcatcaacaacaactggggattccgacccaagagactcaacttcaagctctttaacattcaagtcaaagaggtcacgcagaatgacggtacgacgacgattgccaataaccttaccagcacggttcaggtgtttactgactcggagtaccagctcccgtacgtcctcggctcggcgcatcaaggatgcctcccgccgttcccagcagacgtcttcatggtgccacagtatggatacctcaccctgaacaacgggagtcaggcagtaggacgctcttcattttactgcctggagtactttccttctcagatgctgcgtaccggaaacaactttaccttcagctacacttttgaggacgttcctttccacagcagctacgctcgcagccagagtctggaccgtctcatgaatcctctcatcgaccagtacctgtattacttgagcagaacaaacactccaagtggaaccaccacgcagtcaaggcttcagttttctcaggccggagcgagtgacattcgggaccagtctaggaactggcttcctggaccctgttaccgccagcagcgagtatcaaagacatctgcggataacaacaacagtgaatactcgtggactggagctaccaagtaccacctcaatggcagagactctctggtgaatccgggcccggccatggcaagccacaaggacgatgaagaaaagttttttcctcagagcggggttctcatctttgggaagcaaggctcagagaaaacaaatgtggacattgaaaaggtcatgattacagacgaagaggaaatcaggacaaccaatcccgtggctacggagcagtatggttctgtatctaccaacctccagagaggcaacagacaagcagctaccgcagatgtcaacacacaaggcgttcttccaggcatggtctggcaggacagagatgtgtaccttcaggggcccatctgggcaaagattccacacacggacggacattttcacccctctcccctcatgggtggattcggacttaaacaccctcctccacagattctcatcaagaacaccccggtacctgcgaatccttcgaccaccttcagtgcggcaaagtttgcttccttcatcacacagtactccacgggacaggtcagcgtggagatcgagtgggagctgcagaaggaaaacagcaaacgctggaatcccgaaattcagtacacttccaactacaacaagtctgttaatgtggactttactgtggacactaatggcgtgtattcagagcctcgccccattggcaccagatacctgactcgtaatctgtaa

SEQ ID NO: 12887 - DNA, 2208 bp, Artificial Sequence
  source: /note="Description of Artificial Sequence: Synthetic polynucleotide"
atggctgccgatggttatcttccagattggctcgaggacactctctctgaaggaataagacagtggtggaagctcaaacctggcccaccaccaccaaagcccgcagagcggcataaggacgacagcaggggtcttgtgcttcctgggtacaagtacctcggacccttcaacggactcgacaagggagagccggtcaacgaggcagacgccgcggccctcgagcacgacaaagcctacgaccggcagctcgacagcggagacaacccgtacctcaagtacaaccacgccgacgcggagtttcaggagcgccttaaagaagatacgtcttttgggggcaacctcggacgagcagtcttccaggcgaaaaagagggttcttgaacctctgggcctggttgaggaacctgttaagacggctccgggaaaaaagaggccggtagagcactctcctgtggagccagactcctcctcgggaaccggaaaggcgggccagcagcctgcaagaaaaagattgaattttggtcagactggagacgcagactcagtacctgacccccagcctctcggacagccaccagcagccccctctggtctgggaactaatacgatggctacaggcagtggcgcaccaatggcagacaataacgagggcgccgacggagtgggtaattcctcgggaaattggcattgcgattccacatggatgggcgacagagtcatcaccaccagcacccgaacctgggccctgcccacctacaacaaccacctctacaaacaaatttccagccaatcaggagcctcgaacgacaatcactactttggctacagcaccccttgggggtattttgacttcaacagattccactgccacttttcaccacgtgactggcaaagactcatcaacaacaactggggattccgacccaagagactcaacttcaagctctttaacattcaagtcaaagaggtcacgcagaatgacggtacgacgacgattgccaataaccttaccagcacggttcaggtgtttactgactcggagtaccagctcccgtacgtcctcggctcggcgcatcaaggatgcctcccgccgttcccagcagacgtcttcatggtgccacagtatggatacctcaccctgaacaacgggagtcaggcagtaggacgctcttcattttactgcctggagtactttccttctcagatgctgcgtaccggaaacaactttaccttcagctacacttttgaggacgttcctttccacagcagctacgctcacagccagagtctggaccgtctcatgaatcctctcatcgaccagtacctgtattacttgagcagaacaaacactccaagtggaaccaccacgcagtcaaggcttcagttttctcaggccggagcgagtgacattcgggaccagtctaggaactggcttcctggaccctgttaccgccagcagcgagtatcaaagacatctgcggataacaacaacagtgaatactcgtggactggagttaccaagtaccacctcaatggcagagactctctggtgaatccgggcccggccatggcaagccacaaggacgatgaagaaaagttttttcctcagagcggggttctcatctttgggaagcaaggctcagagaaaacaaatgtggacattgaaaaggtcatgattacagacgaagaggaaatcaggacaaccaatcccgtggctacggagcagtatggttctgtatctaccaacctccagagaggcaacagacaagcagctaccgcagatgtcaacacacaaggcgttcttccaggcatggtctggcaggacagagatgtgtaccttcaggggcccatctgggcaaagattccacacacggacggacattttcacccctctcccctcatgggtggattcggacttaaacaccctcctccacagattctcatcaagaacaccccggtacctgcgaatccttcgaccaccttcagtgcggcaaagtttgcttccttcatcacacagtactccacgggacaggtcagcgtggagatcgagtgggagctgcagaaggaaaacagcaaacgctggaatcccgaaattcagtacacttccaactacaacaagtctgttaatgtggactttactgtggacactaatggcgtgtattcagagcctcgccccattggcaccagatacctgactcgtaatctgtaa

SEQ ID NO: 12888 - DNA, 2208 bp, Artificial Sequence
  source: /note="Description of Artificial Sequence: Synthetic polynucleotide"
atggctgccgatggttatcttccagattggctcgaggacactctctctgaaggaataagacagtggtggaagctcaaacctggcccaccaccaccaaagcccgcagagcggcataaggacgacagcaggggtcttgtgcttcctgggtacaagtacctcggacccttcaacggactcgacaagggagagccggtcaacgaggcagacgccgcggccctcgagcacgacaaagcctacgaccggcagctcgacagcggagacaacccgtaccccaagtacaaccacgccgacgcggagtttcaggagcgccttaaagaagatacgtcttttgggggcaacctcggacgagcagtcttccaggcgaaaaagagggttcttgaacctctgggcctggttgaggaacctgttaagacggctccgggaaaaaagaggccggtagagcactctcctgtggagccagactcctcctcgggaaccggaaaggcgggccagcagcctgcaagaaaaagattgaattttggtcagactggagacgcagactcagtacctgacccccagcctctcggacagccaccagcagccccctctggtctgggaactaatacgatggctacaggcagtggcgcaccaatggcagacaataacgagggcgccgacggagtgggtaattcctcgggaaattggcattgcgattccacatggatgggcgacagagtcatcaccaccagcacccgaacctgggccctgcccacctacaacaaccacctctacaaacaaatttccagccaatcaggagcctcgaacgacaatcactactttggctacagcaccccttgggggtattttgacttcaacagattccactgccacttttcaccacgtgactggcaaagactcatcaacaacaactggggattccgacccaagagactcaacttcaagctctttaacattcaagtcaaagaggtcacgcagaatgacggtacgacgacgattgccaataaccttaccagcacggttcaggtgtttactgactcggagtaccagctcccgtacgtcctcggctcggcgcatcaaggatgcctcccgccgttcccagcagacgtcttcatggtgccacagtatggatacctcaccctgaacaacgggagtcaggcagtaggacgctcttcattttactgcctggagtactttccttctcagatgctgcgtaccggaaacaactttaccttcagctacacttttgaggacgttcctttccacagcagctacgctcacagccagagtctggaccgtctcatgaatcctctcatcgaccagtacctgtattacttgagcagaacaaacactccaagtggaaccaccacgcagtcaaggcttcagttttctcaggccggagcgagtgacattcgggaccagtctaggaactggcttcctggaccctgttaccgccagcagcgagtatcaaagacatctgcggataacaacaacagtgaatactcgtggactggagctaccaagtaccacctcaatggcagagactctctggtgaatccgggcccggccatggcaagccacaaggacgatgaagaaaagttttttcctcagagcggggttctcatctttgggaagcaaggctcagagaaaacaaatgtggacattgaaaaggtcatgattacagacgaagaggaaatcaggacaaccaatcccgtggctacggagcagtatggttctgtatctaccaacctccagagaggcaacagacaagcagctaccgcagatgtcaacacacaaggcgttcttccaggcatggtctggcaggacagagatgtgtaccttcaggggcccatctgggcaaagattccacacacggacggacattttcacccctctcccctcatgggtggattcggacttaaacaccctcctccacagattctcatcaagaacaccccggtacctgcgaatccttcgaccaccttcagtgcggcaaagtttgcttccttcatcacacagtactccacgggacaggtcagcgtggagatcgagtgggagctgcagaaggaaaacagcaaacgctggaatcccgaaattcagtacacttccaactacaacaagtctgttaatgtggactttactgtggacactaatggcgtgtattcagagcctcgccccattggcaccagatacctgactcgtaatctgtaa

SEQ ID NO: 12889 - DNA, 2208 bp, Artificial Sequence
  source: /note="Description of Artificial Sequence: Synthetic polynucleotide"
atggctgccgatggttatcttccagattggctcgaggacactctctctgaaggaataagacagtggtggaagctcaaacctggcccaccaccaccaaagcccgcagagcggcataaggacgacagcaggggtcttgtgcttcctgggtacaagtacctcggacccttcaacggactcgacaagggagagccggtcaacgaggcagacgccgcggccctcgagcacgacaaagcctacgaccggcagctcgacagcggagacaacccgtacctcaagtacaaccacgccgacgcggagtttcaggagcgccttaaagaagatacgtcttttgggggcaacctcggacgagcagtcttccaggcgaaaaagagggttcttgaacctctgggcctggttgaggaacctgttaagacggctccgggaaaaaagaggccggtagagcactctcctgtggagccagactcctcctcgggaaccggaaaggcgggccagcagcctgcaagaaaaagattgaattttggtcagactggagacgcagactcagtacctgacccccagcctctcggacagccaccagcagccccctctggtctgggaactaatacgatggctacaggcagtggcgcaccaatggcagacaataacgagggcgccgacggagtgggtaattcctcgggaaattggcattgcgattccacatggatgggcgacagagtcatcaccaccagcacccgaacctgggccctgcccacctacaacaaccacctctacaaacaaatttccagccaatcaggagcctcgaacgacaatcactactttggctacagcaccccttgggggtattttgacttcaacagattccactgccacttttcaccacgtgactggcaaagactcatcaacaacaactggggattccgacccaagagactcaacttcaagctctttaacattcaagtcaaagaggtcacgcagaatgacggtacgacgacgattgccaataaccttaccagcacggttcaggtgtttactgactcggagtaccagctcccgtacgtcctcggctcggcgcatcaaggatgcctcccgccgttcccagcagacgtcttcatggtgccacagtatggatacctcaccctgaacaacgggagtcaggcagtaggacgctcttcattttactgcctggagtactttccttctcagatgctgcgtaccggaaacaactttaccttcagctacacttttgaggacgttcctttccacagcagctacgctcacagccagagtctggaccgtctcatgaatcctctcatcgaccagtacctgtattacttgagcagaacaaacactccaagtggaaccaccacgcagtcaaggcttcagttttctcaggccggagcgagtgacattcgggaccagtctaggaactggcttcctggaccctgttaccgccagcagcgagtatcaaagacatctgcggataacaacaacagtgaatactcgtggactggagctaccaagtaccacctcaatggcagagactctctggtgaatccgggcccggccatggcaagccacaaggacgatgaagaaaagttttttcctcagagcggggttcccatctttgggaagcaaggctcagagaaaacaaatgtggacattgaaaaggtcatgattacagacgaagaggaaatcaggacaaccaatcccgtggctacggagcagtatggttctgtatctaccaacctccagagaggcaacagacaagcagctaccgcagatgtcaacacacaaggcgttcttccaggcatggtctggcaggacagagatgtgtaccttcaggggcccatctgggcaaagattccacacacggacggacattttcacccctctcccctcatgggtggattcggacttaaacaccctcctccacagattctcatcaagaacaccccggtacctgcgaatccttcgaccaccttcagtgcggcaaagtttgcttccttcatcacacagtactccacgggacaggtcagcgtggagatcgagtgggagctgcagaaggaaaacagcaaacgctggaatcccgaaattcagtacacttccaactacaacaagtctgttaatgtggactttactgtggacactaatggcgtgtattcagagcctcgccccattggcaccagatacctgactcgtaatctgtaa

SEQ ID NO: 12890 - DNA, 2208 bp, Artificial Sequence
  source: /note="Description of Artificial Sequence: Synthetic polynucleotide"
atggctgccgatggttatcttccagattggctcgaggacactctctctgaaggaataagacagtggtggaagctcaaacctggcccaccaccaccaaagcccgcagagcggcataaggacgacagcaggggtcttgtgcttcctgggtacaagtacctcggacccttcaacggactcgacaagggagagccggtcaacgaggcagacgccgcggccctcgagcacgacaaagcctacgaccggcagctcgacagcggagacaacccgtacctcaagtacaaccacgccgacgcggagtttcaggagcgccttaaagaagatacgtcttttgggggcaacctcggacgagcagtcttccaggcgaaaaagagggttcttgaacctctgggcctggttgaggaacctgttaagacggctccgggaaaaaagaggccggtagagcactctcctgtggagccagactcctcctcgggaaccggaaaggcgggccagcagcctgcaagaaaaagattgaattttggtcagactggagacgcagactcagtacctgacccccagcctctcggacagccaccagcagccccccctggtctgggaactaatacgatggctacaggcagtggcgcaccaatggcagacaataacgagggcgccgacggagtgggtaattcctcgggaaattggcattgcgattccacatggatgggcgacagagtcatcaccaccagcacccgaacctgggccctgcccacctacaacaaccacctctacaaacaaatttccagccaatcaggagcctcgaacgacaatcactactttggctacagcaccccttgggggtattttgacttcaacagattccactgccacttttcaccacgtgactggcaaagactcatcaacaacaactggggattccgacccaagagactcaacttcaagctctttaacattcaagtcaaagaggtcacgcagaatgacggtacgacgacgattgccaataaccttaccagcacggttcaggtgtttactgactcggagtaccagctcccgtacgtcctcggctcggcgcatcaaggatgcctcccgccgttcccagcagacgtcttcatggtgccacagtatggatacctcaccctgaacaacgggagtcaggcagtaggacgctcttcattttactgcctggagtactttccttctcagatgctgcgtaccggaaacaactttaccttcagctacacttttgaggacgttcctttccacagcagctacgctcacagccagagtctggaccgtctcatgaatcctctcatcgaccagtacctgtattacttgagcagaacaaacactccaagtggaaccaccacgcagtcaaggcttcagttttctcaggccggagcgagtgacattcgggaccagtctaggaactggcttcctggaccctgttaccgccagcagcgagtatcaaagacatctgcggataacaacaacagtgaatactcgtggactggagctaccaagtaccacctcaatggcagagactctctggtgaatccgggcccggccatggcaagccacaaggacgatgaagaaaagttttttcctcagagcggggttctcatctttgggaagcaaggctcagagaaaacaaatgtggacattgaaaaggtcatgattacagacgaagaggaaatcaggacaaccaatcccgtggctacggagcagtatggttctgtatctaccaacctccagagaggcaacagacaagcagctaccgcagatgtcaacacacaaggcgttcttccaggcatggtctggcaggacagagatgtgtaccttcaggggcccatctgggcaaagattccacacacggacggacattttcacccctctcccctcatgggtggattcggacttaaacaccctcctccacagattctcatcaagaacaccccggtacctgcgaatccttcgaccaccttcagtgcggcaaagtttgcttccttcatcacacagtactccacgggacaggtcagcgtggagatcgagtgggagctgcagaaggaaaacagcaaacgctggaatcccgaaattcagtacacttccaactacaacaagtctgttaatgtggactttactgtggacactaatggcgtgtattcagagcctcgccccattggcaccagatacctgactcgtaatctgtaa

SEQ ID NO: 12891 - DNA, 2208 bp, Artificial Sequence
  source: /note="Description of Artificial Sequence: Synthetic polynucleotide"
atggctgccgatggttatcttccagattggctcgaggacactctctctgaaggaataagacagtggtggaagctcaaacctggcccaccaccaccaaagcccgcagagcggcataaggacgacagcaggggtcttgtgcttcctgggtacaagtacctcggacccttcaacggactcgacaagggagagccggtcaacgaggcagacgccgcggccctcgagcacgacaaagcctacgaccggcagctcgacagcggagacaacccgtacctcaagtacaaccacgccgacgcggagtttcaggagcgccttaaagaagatacgtcttttgggggcaacctcggacgagcagtcttccaggcgaaaaagagggttcttgaacctctgggcctggttgaggaacctgttaagacggctccgggaaaaaagaggccggtagagcactctcctgtggagccagactcctcctcgggaaccggaaaggcgggccagcagcctgcaagaaaaagattgaattttggtcagactggagacgcagactcagtacctgacccccagcctctcggacagccaccagcagccccctctggtctgggaactaatacgatggctacaggcagtggcgcaccaatggcagacaataacgagggcgccgacggagtgggtaattcctcgggaaattggcattgcgattccacatggatgggcgacagagtcatcaccaccagcacccgaacctgggccctgcccacctacaacaaccacctctacaaacaaatttccagccaatcaggagcctcgaacgacaatcactactttggctacagcaccccttgggggtattttgacttcaacagattccactgccacttttcaccacgtgactggcaaagactcatcaacaacaactggggattccgacccaagagactcaacttcaagctctttaacattcaagtcaaagaggtcacgcagaatgacggtacgacgacgattgccaataaccttaccagcacggttcaggtgtttactgactcggagtaccagctcccgtacgtcctcggctcggcgcatcaaggatgcctcccgccgttcccagcagacgtcttcatggtgccacagtatggatacctcaccctgaacaacgggagtcaggcagtaggacgctcttcattttactgcctggagtactttccttctcagatgctgcgtaccggaaacaactttaccttcagctacacttttgaggacgttcctttccacagcagctacgctcacagccagagtctggaccgtctcatgaatcctctcatcgaccagtacctgtattacttgagcagaacaaacactccaagtggaaccaccacgcagtcaaggcttcagttttctcaggccggagcgagtgacattcgggaccagtctaggaactggcttcctggaccctgttaccgccagcagcgagtatcaaagacatctgcggataacaacaacagtgaatactcgtggactggagctaccaagtaccacctcaatggcagagactctctggtgaatccgggcccggccatggcaagccacaaggacgatgaagaaaagttttttcctcagagcgggattctcatctttgggaagcaaggctcagagaaaacaaatgtggacattgaaaaggtcatgattacagacgaagaggaaatcaggacaaccaatcccgtggctacggagcagtatggttctgtatctaccaacctccagagaggcaacagacaagcagctaccgcagatgtcaacacacaaggcgttcttccaggcatggtctggcaggacagagatgtgtaccttcaggggcccatctgggcaaagattccacacacggacggacattttcacccctctcccctcatgggtggattcggacttaaacaccctcctccacagattctcatcaagaacaccccggtacctgcgaatccttcgaccaccttcagtgcggcaaagtttgcttccttcatcacacagtactccacgggacaggtcagcgtggagatcgagtgggagctgcagaaggaaaacagcaaacgctggaatcccgaaattcagtacacttccaactacaacaagtctgttaatgtggactttactgtggacactaatggcgtgtattcagagcctcgccccattggcaccagatacctgactcgtaatctgtaa

SEQ ID NO: 12892 - DNA, 2208 bp, Artificial Sequence
  source: /note="Description of Artificial Sequence: Synthetic polynucleotide"
atggctgccgatggttatcttccagattggctcgaggacactctctctgaaggaataagacagtggtggaagctcaaacctggcccaccaccaccaaagcccgcagagcggcataaggacgacagcaggggtcttgtgcttcctgggtacaagtacctcggacccttcaacggactcgacaagggagagccggtcaacgaggcagacgccgcggccctcgagcacgacaaagcctacgaccggcagctcgacagcggagacaacccgtacctcaagtacaaccacgccgacgcggagtttcaggagcgccttaaagaagatacgtcttttgggggcaacctcggacgagcagtcttccaggcgaaaaagagggttcttgaacctctgggcctggttgaggaacctgttaagacggctccgggaaaaaagaggccggtagagcactctcctgtggagccagactcctcctcgggaaccggaaaggcgggccagcagcctgcaagaaaaagattgaattttggtcagactggagacgcagactcagtacctgacccccagcctctcggacagccaccagcagccccctctggtctgggaactaatacgatggctacaggcagtggcgcaccaatggcagacaataacgagggcgccgacggagtgggtaattcctcgggaaattggcattgcgattccacatggatgggcgacagagtcatcaccaccagcacccgaacctgggccctgcccacctacaacaaccacctctacaaacaaatttccagccaatcaggagcctcgaacgacaatcactactttggctacagcaccccttgggggtattttgacttcaacagattccactgccacttttcaccacgtgactggcaaagactcatcaacaacaactggggattccgacccaagagactcaacttcaagctctttaacattcaagtcaaagaggtcacgcagaatgacggtacgacgacgattgccaataaccttaccagcacggttcaggtgtttactgactcggagtaccagctcccgtacgtcctcggctcggcgcatcaaggatgcctcccgccgttcccagcagacgtcttcatggtgccacagtatggatacctcaccctgaacaacgggagtcaggcagtaggacgctcttcattttactgcctggagtactttccttctcagatgctgcgtaccggaaacaactttaccttcagctacacttttgaggacgttcctttccacagcagctacgctcacagccagagtctggaccgtctcatgaatcctctcatcgaccagtacctgtattacttgagcagaacaaacactccaagtggaaccaccacgcagtcaaggcttcagttttctcaggccggagcgagtgacattcgggaccagtctaggaactggcttcctggaccctgttaccgccagcagcgagtatcaaagacatctgcggataacaacaacagtgaatactcgtggactggagctaccaagtaccacctcaatggcagagactctctggtgaatccgggcccggccatggcaagccacaaggacgatgaagaaaagttttttcctcagagcggggttctcatctttgggaagcaaggctcagagaaaacaaatgtggacattgaaaaggtcatgattacagacgaagaggaaatcaggacaaccaatcccgtggctacggagcagtatggttctgtatctaccaacctccagagaggcaacagacaagcagctaccgcagatgtcaacacacaaggcgttcttccaggcatggtctggcaggacagagatgtgtaccttcaggggcccatctgggcaaagattccacacacggacggacattttcacccctctcccctcatgggtggattcggacttaaacaccctcctccacagattctcatcaagaacaccccggtacctgcgaatccttcgaccaccttcagtgcggcaaagtttgcttccttcatcacacagtactccacgggacaggtcagcgtggagatcgagtgggagctgcagaaggaaaacagcaaacgctggaatcccgaaattcagtgcacttccaactacaacaagtctgttaatgtggactttactgtggacactaatggcgtgtattcagagcctcgccccattggcaccagatacctgactcgtaatctgtaa

SEQ ID NO: 12893 - DNA, 2208 bp, Artificial Sequence
  source: /note="Description of Artificial Sequence: Synthetic polynucleotide"
atggctgccgatggttatcttccagattggctcgaggacactctctctgaaggaataagacagtggtggaagctcaaacctggcccaccaccaccaaagcccgcagagcggcataaggacgacagcaggggtcttgtgcttcctgggtacaagtacctcggacccttcaacggactcgacaagggagagccggtcaacgaggcagacgccgcggccctcgagcacgacaaagcctacgaccggcagctcgacagcggagacaacccgtacctcaagtacaaccacgccgacgcggagtttcaggagcgccttaaagaagatacgtcttttgggggcaacctcggacgagcagtcttccaggcgaaaaagagggttcttgaacctctgggcctggttgaggaacctgttaagacggctccgggaaaaaagaggccggtagagcactctcctgtggagccagactcctcctcgggaaccggaaaggcgggccagcagcctgcaagaaaaagattgaattttggtcagactggagacgcagactcagtacctgacccccagcctctcggacagccaccagcagccccctctggtctgggaactaatacgatggctacaggcagtggcgcaccaatggcagacaataacgagggcgccgacggagtgggtaattcctcgggaaattggcattgcgattccacatggatgggcgacagagtcatcaccaccagcacccgaacctgggccctgcccacctacaacaaccacctctacaaacaaatttccagccaatcaggagcctcgaacgacaatcactactttggctacagcaccccttgggggtattttgacttcaacagattccactgccacttttcaccacgcgactggcaaagactcatcaacaacaactggggattccgacccaagagactcaacttcaagctctttaacattcaagtcaaagaggtcacgcagaatgacggtacgacgacgattgccaataaccttaccagcacggttcaggtgtttactgactcggagtaccagctcccgtacgtcctcggctcggcgcatcaaggatgcctcccgccgttcccagcagacgtcttcatggtgccacagtatggatacctcaccctgaacaacgggagtcaggcagtaggacgctcttcattttactgcctggagtactttccttctcagatgctgcgtaccggaaacaactttaccttcagctacacttttgaggacgttcctttccacagcagctacgctcacagccagagtctggaccgtctcatgaatcctctcatcgaccagtacctgtattacttgagcagaacaaacactccaagtggaaccaccacgcagtcaaggcttcagttttctcaggccggagcgagtgacattcgggaccagtctaggaactggcttcctggaccctgttaccgccagcagcgagtatcaaagacatctgcggataacaacaacagtgaatactcgtggactggagctaccaagtaccacctcaatggcagagactctctggtgaatccgggcccggccatggcaagccacaaggacgatgaagaaaagttttttcctcagagcggggttctcatctttgggaagcaaggctcagagaaaacaaatgtggacattgaaaaggtcatgattacagacgaagaggaaatcaggacaaccaatcccgtggctacggagcagtatggttctgtatctaccaacctccagagaggcaacagacaagcagctaccgcagatgtcaacacacaaggcgttcttccaggcatggtctggcaggacagagatgtgtaccttcaggggcccatctgggcaaagattccacacacggacggacattttcacccctctcccctcatgggtggattcggacttaaacaccctcctccacagattctcatcaagaacaccccggtacctgcgaatccttcgaccaccttcagtgcggcaaagtttgcttccttcatcacacggtactccacgggacaggtcagcgtggagatcgagtgggagctgcagaaggaaaacagcaaacgctggaatcccgaaattcagtacacttccaactacaacaagtctgttaatgtggactttactgtggacactaatggcgtgtattcagagcctcgccccattggcaccagatacctgactcgtaatctgtaa

SEQ ID NO: 12894 - DNA, 2208 bp, Artificial Sequence
  source: /note="Description of Artificial Sequence: Synthetic polynucleotide"
atggctgccgatggttatcttccagattggctcgaggacactctctctgaaggaataagacagtggtggaagctcaaacctggcccaccaccaccaaagcccgcagagcggcataaggacgacagcaggggtcttgtgcttcctgggtacaagtacctcggacccttcaacggactcgacaagggagagccggtcaacgaggcagacgccgcggccctcgagcacgacaaagcctacgaccggcagctcgacagcggagacaacccgtacctcaagtacaaccacgccgacgcggagtttcgggagcgccttaaagaagatacgtcttttgggggcaacctcggacgagcagtcttccaggcgaaaaagagggttcttgaacctctgggcctggttgaggaacctgttaagacggctccgggaaaaaagaggccggtagagcactctcctgtggagccagactcctcctcgggaaccggaaaggcgggccagcagcctgcaagaaaaagattgaattttggtcagactggagacgcagactcagtacctgacccccagcctctcggacagccaccagcagccccctctggtctgggaactaatacgatggctacaggcagtggcgcaccaatggcagacaataacgagggcgccgacggagtgggtaattcctcgggaaattggcattgcgattccacatggatgggcgacagagtcatcaccaccagcacccgaacctgggccctgcccacctacaacaaccacctctacaaacaaatttccagccaatcaggagcctcgaacgacaatcactactttggctacagcaccccttgggggtattttgacttcaacagattccactgccacttttcaccacgtgactggcaaagactcatcaacaacaactggggattccgacccaagagactcaacttcaagctctttaacattcaagtcaaagaggtcacgcagaatgacggtacgacgacgattgccaataaccttaccagcacggttcaggtgtttactgactcggagtaccagctcccgtacgtcctcggctcggcgcatcaaggatgcctcccgccgttcccagcagacgtcttcatggtgccacagtatggatacctcaccctgaacaacgggagtcaggcagtaggacgctcttcattttactgcctggagtactttccttctcagatgctgcgtaccggaaacaactttaccttcagctacacttttgaggacgttcctttccacagcagctacgctcacagccagagtctggaccgtctcatgaatcctctcatcgaccagtacctgtattacttgagcagaacaaacactccaagtggaaccaccacgcagtcaaggcttcagttttctcaggccggagcgagtgacattcgggaccagtctaggaactggcttcctggaccctgttaccgccagcagcgagtatcaaagacatctgcggataacaacaacagtgaatactcgtggactggagctaccaagtaccacctcaatggcagagactctctggtgaatccgggcccggccatggcaagccacaaggacgatgaagaaaagttttttcctcagagcggggttctcatctttgggaagcaaggctcagagaaaacaaatgtggacattgaaaaggtcatgattacagacgaagaggaaatcaggacaaccaatcccgtggctacggagcagtatggttctgtatctaccaacctccagagaggcaacagacaagcagctaccgcagatgtcaacacacaaggcgttcttccaggcatggtctggcaggacagagatgtgtaccttcaggggcccatctgggcaaagattccacacacggacggacattttcacccctctcccctcatgggtggattcggacttaaacaccctcctccacagattctcatcaagaacaccccggtacctgcgaatccttcgaccaccttcagtgcggcaaagtttgcttccttcatcacacagtactccacgggacaggtcagcgtggagatcgagtgggagctgcagaaggaaaacagcaaacgctggaatcccgaaattcagtacacttccaactacaacaagtctgttaatgtggactttactgtggacactaatggcgtgtattcagagcctcgccccattggcaccagatacctgactcgtaatctgtaa

SEQ ID NO: 12895 - DNA, 2208 bp, Artificial Sequence
  source: /note="Description of Artificial Sequence: Synthetic polynucleotide"
atggctgccgatggttatcttccagattggctcgaggacactctctctgaaggaataagacagtggtggaagctcaaacctggcccaccaccaccaaagcccgcagagcggcataaggacgacagcaggggtcttgtgcttcctgggtacaagtacctcggacccttcaacggactcgacaagggagagccggtcaacgaggcagacgccgcggccctcgagcacgacaaagcctacgaccggcagctcgacagcggagacaacccgtacctcaagcacaaccacgccgacgcggagtttcaggagcgccttaaagaagatacgtcttttgggggcaacctcggacgagcagtcttccaggcgaaaaagagggttcttgaacctctgggcctggttgaggaacctgttaagacggctccgggaaaaaagaggccggtagagcactctcctgtggagccagactcctcctcgggaaccggaaaggcgggccagcagcctgcaagaaaaagattgaattttggtcagactggagacgcagactcagtacctgacccccagcctctcggacagccaccagcagccccctctggtctgggaactaatacgatggctacaggcagtggcgcaccaatggcagacaataacgagggcgccgacggagtgggtaattcctcgggaaattggcattgcgattccacatggatgggcgacagagtcatcaccaccagcacccgaacctgggccctgcccacctacaacaaccacctctacaaacaaatttccagccaatcaggagcctcgaacgacaatcactactttggctacagcaccccttgggggtattttgacttcaacagattccactgccacttttcaccacgtgactggcaaagactcatcaacaacaactggggattccgacccaagagactcaacttcaagctctttaacattcaagtcaaagaggtcacgcagaatgacggtacgacgacgattgccaataaccttaccagcacggttcaggtgtttactgactcggagtaccagctcccgtacgtcctcggctcggcgcatcaaggatgcctcccgccgttcccagcagacgtcttcatggtgccacagtatggatacctcaccctgaacaacgggagtcaggcagtaggacgctcttcattttactgcctggagtactttccttctcagatgctgcgtaccggaaacaactttaccttcagctacacttttgaggacgttcctttccacagcagctacgctcacagccagagtctggaccgtctcatgaatcctctcatcgaccagtacctgtattacttgagcagaacaaacactccaagtggaaccaccacgcagtcaaggcttcagttttctcaggccggagcgagtgacattcgggaccagtctaggaactggcttcctggaccctgttaccgccagcagcgagtatcaaagacatctgcggataacaacaacagtgaatactcgtggactggagctaccaagtaccacctcaatggcagagactctctggtgaatccgggcccggccatggcaagccacaaggacgatgaagaaaagttttttcctcagagcggggttctcatctttgggaagcaaggctcagagaaaacaaatgtggacattgaaaaggtcatgattacagacgaagaggaaatcaggacaaccaatcccgtggctacggagcagtatggttctgtatctaccaacctccagagaggcaacagacaagcagctaccgcagatgtcaacacacaaggcgttcttccaggcatggtctggcaggacagagatgtgtaccttcaggggcccatctgggcaaagattccacacacggacggacattttcacccctctcccctcatgggtggattcggacttaaacaccctcctccacagattctcatcaagaacaccccggtacctgcgaatccttcgaccaccttcagtgcggcaaagtttgcttccttcatcacacagtactccacgggacaggtcagcgtggagatcgagtgggagctgcagaaggaaaacagcaaacgctggaatcccgaaattcagtacacttccaactacaacaagtctgttaatgtggactttactgtggacactaatggcgtgtattcagagcctcgccccattggcaccagatacctgactcgtaatctgtaa

SEQ ID NO: 12896 - DNA, 2208 bp, Artificial Sequence
  source: /note="Description of Artificial Sequence: Synthetic polynucleotide"
atggctgccgatggttatcttccagattggctcgaggacactctctctgaaggaataagacagtggtggaagctcaaacctggcccaccaccaccaaagcccgcagagcggcataaggacgacagcaggggtcttgtgcttcctgggtacaagtacctcggacccttcaacggactcgacaagggagagccggtcaacgaggcagacgccgcggccctcgagcacgacaaagcctacgaccggcagctcgacagcggagacaacccgtacctcaagtacaaccacgccgacgcggagtttcaggagcgccttaaagaagatacgtcttttgggggcaacctcggacgagcagtcttccaggcgaaaaagagggttcttgaacctctgggcctggttgaggaacctgttaagacggctccgggaaaaaagaggccggtagagcactctcctgtggagccagactcctcctcgggaaccggaaaggcgggccagcagcctgcaagaaaaagattgaattttggtcagactggagacgcagactcagtacctgacccccagcctctcggacagccaccagcagccccctctggtctgggaactaatacgatggctacaggcagtggcgcaccaatggcagacaataacgagggcgccgacggagtgggtaattcctcgggaaattggcattgcgattccacatggatgggcgacagagtcatcaccaccagcacccgaacctgggccctgcccacctacaacaaccacctctacaaacaaatttccagccaatcaggagcctcgaacgacaatcactactttggctacagcaccccttgggggtattttgacttcaacagattccactgccacttttcaccacgtgactggcaaagactcatcaacaacaactggggattccgacccaagagactcaacttcaagctctttaacattcaagtcaaagaggtcacgcagaatgacggtacgacgacgattgccaataaccttaccagcacggttcaggtgtttactgactcggagtaccagctcccgtacgtcctcggctcggcgcatcaaggatgcctcccgccgttcccagcagacgtcttcatggtgccacagtatggatacctcaccctgaacaacgggagtcgggcagtaggacgctcttcattttactgcctggagtactttccttctcagatgctgcgtaccggaaacaactttaccttcagctacacttttgaggacgttcctttccacagcagctacgctcacagccagagtctggaccgtctcatgaatcctctcatcgaccagtacctgtattacttgagcagaacaaacactccaagtggaaccaccacgcagtcaaggcttcagttttctcaggccggagcgagtgacattcgggaccagtctaggaactggcttcctggaccctgttaccgccagcagcgagtatcaaagacatctgcggataacaacaacagtgaatactcgtggactggagctaccaagtaccacctcaatggcagagactctctggtgaatccgggcccggccatggcaagccacaaggacgatgaagaaaagttttttcctcagagcggggttctcatctttgggaagcaaggctcagagaaaacaaatgtggacattgaaaaggtcatgattacagacgaagaggaaatcaggacaaccaatcccgtggctacggagcagtatggttctgtatctaccaacctccagagaggcaacagacaagcagctaccgcagatgtcaacacacaaggcgttcttccaggcatggtctggcaggacagagatgtgtaccttcaggggcccatctgggcaaagattccacacacggacggacattttcacccctctcccctcatgggtggattcggacttaaacaccctcctccacagattctcatcaagaacaccccggtacctgcgaatccttcgaccaccttcagtgcggcaaagtttgcttccttcatcacacagtactccacgggacaggtcagcgtggagatcgagtgggagctgcagaaggaaaacagcaaacgctggaatcccgaaattcagtacacttccaactacaacaagtctgttaatgtggactttactgtggacactaatggcgtgtattcagagcctcgccccattggcaccagatacctgactcgtaatctgtaa

SEQ ID NO: 12897 - DNA, 2208 bp, Artificial Sequence
  source: /note="Description of Artificial Sequence: Synthetic polynucleotide"
atggctgccgatggttatcttccagattggctcgaggacactctctctgaaggaataagacagtggtggaagctcaaacctggcccaccaccaccaaagcccgcagagcggcataaggacgacagcaggggtcttgtgcttcctgggtacaagtacctcggacccttcaacggactcgacaagggagagccggtcaacgaggcagacgccgcggccctcgagcacgacaaagcctacgaccggcagctcgacagcggagacaacccgtacctcaagtacaaccacgccgacgcggagtttcaggagcgccttaaagaagatacgtcttttgggggcaacctcggacgagcagtcttccaggcgaaaaagagggttcttgaacctctgggcctggttgaggaacctgttaagacggctccgggaaaaaagaggccggtagagcactctcctgtggagccagactcctcctcgggaaccggaaaggcgggccagcagcctgcaagaaaaagattgaattttggtcagactggagacgcagactcagtacctgacccccagcctctcggacagccaccagcagccccctctggtctgggaactaatacgatggctacaggcagtggcgcaccaatggcagacaataacgagggcgccgacggagtgggtaattcctcgggaaattggcattgcgattccacatggatgggcgacagagtcatcaccaccagcacccgaacctgggccctgcccacctacaacaaccacctctacaaacaaatttccagccaatcaggagcctcgaacgacaatcactactttggctacagcaccccttgggggtattttgacttcaacagattccactgccacttttcaccacgtgactggcaaagactcatcaacaacaactggggattccgacccaagagactcaacttcaagctctttaacattcaagtcaaagaggtcacgcagaatgacggtacgacgacgattgccaataaccttaccagcacggttcaggtgtttactgactcggagtaccagctcccgtacgtcctcggctcggcgcatcaaggatgcctcccgccgttcccagcagacgtcttcatggtgccacagtatggatacctcaccctgaacaacgggagtcaggcagtaggacgctcttcattttactgcctggagtactttccttctcagatgctgcgtaccggaaacaactttaccttcagctacacttttgaggacgttcctttccacagcagctacgctcacagccagagtctggaccgtctcatgaatcctctcatcgaccagtacctgtattacttgagcagaacaaacactccaagtggaaccaccacgcagtcaaggcttcagttttctcaggccggagcgagtgacattcgggaccagtctaggaactggcttcctggaccctgttaccgccagcagcgagtatcaaagacatctgcggataacaacaacagtgaatactcgtggactggagctaccaagtaccacctcaatggcagagactctctggtgaatccgggcccggccatggcaagccacaaggacgatgaagaaaagttttttcctcagagcggggttctcatctttgggaagcaaggctcagagaaaacaaatgtggacattgaaaaggtcgtgattacagacgaagaggaaatcaggacaaccaatcccgtggctacggagcagtatggttctgtatctaccaacctccagagaggcaacagacaagcagctaccgcagatgtcaacacacaaggcgttcttccaggcatggtctggcaggacagagatgtgtaccttcaggggcccatctgggcaaagattccacacacggacggacattttcacccctctcccctcatgggtggattcggacttaaacaccctcctccacagattctcatcaagaacaccccggtacctgcgaatccttcgaccaccttcagtgcggcaaagtttgcttccttcatcacacagtactccacgggacaggtcagcgtggagatcgagtgggagctgcagaaggaaaacagcaaacgctggaatcccgaaattcagtacacttccaactacaacaagtctgttaatgtggactttactgtggacactaatggcgtgtattcagagcctcgccccattggcaccagatacctgactcgtaatctgtaa

SEQ ID NO: 12898 - DNA, 2208 bp, Artificial Sequence
  source: /note="Description of Artificial Sequence: Synthetic polynucleotide"
atggctgccgatggttatcttccagattggctcgaggacactctctctgaaggaataagacagtggtggaagctcaaacctggcccaccaccaccaaagcccgcagagcggcataaggacgacagcaggggtcttgtgcttcctgggtacaagtacctcggacccttcaacggactcgacaagggagagccggtcaacgaggcagacgccgcggccctcgagcacgacaaagcctacgaccggcagctcgacagcggagacaacccgtacctcaagtacaaccacgccgacgcggagtttcaggagcgccttaaagaagatacgtcttttgggggcaacctcggacgagcagtcttccaggcgaaaaagagggttcttgaacctctgggcctggttgaggaacctgttaagacggctccgggaaaaaagaggccggtagagcactctcctgtggagccagactcctcctcgggaaccggaaaggcgggccagcagcctgcaagaaaaagattgaattttggtcagactggagacgcagactcagtacctgacccccagcctctcggacagccaccagcagccccctctggtctgggaactaatacgatggctacaggcagtggcgcaccaatggcagacaataacgagggcgccgacggagtgggtaattcctcgggaaattggcattgcgattccacatggatgggcgacagagtcatcaccaccagcacccgaacctgggccctgcccacctacaacaaccacctctacaaacaaatttccagccaatcaggagcctcgaacgacaatcactactttggctacagcaccccttgggggtattttgacttcaacagattccactgccacttttcaccacgtgactggcaaagactcatcaacaacaactggggattccgacccaagagactcaacttcaagctctttaacattcaagtcaaagaggtcacgcagaatgacggtacgacgacgattgccaataaccttaccagcacggttcaggtgtttactgactcggagtaccagctcccgtacgtcctcggctcggcgcatcaaggatgcctcccgccgttcccagcagacgtcttcatggtgccacagtatggatacctcaccctgaacaacgggagtcaggcagtaggacgctcttcattttactgcctggagtactttccttctcagatgctgcgtaccggaaacaactttaccttcagccacacttttgaggacgttcctttccacagcagctacgctcacagccagagtctggaccgtctcatgaatcctctcatcgaccagtacctgtattacttgagcagaacaaacactccaagtggaaccaccacgcagtcaaggcttcagttttctcaggccggagcgagtgacattcgggaccagtctaggaactggcttcctggaccctgttaccgccagcagcgagtatcaaagacatctgcggataacaacaacagtgaatactcgtggactggagctaccaagtaccacctcaatggcagagactctctggtgaatccgggcccggccatggcaagccacaaggacgatgaagaaaagttttttcctcagagcggggttctcatctttgggaagcaaggctcagagaaaacaaatgtggacattgaaaaggtcatgattacagacgaagaggaaatcaggacaaccaatcccgtggctacggagcagtatggttctgtatctaccaacctccagagaggcaacagacaagcagctaccgcagatgtcaacacacaaggcgttcttccaggcatggtctggcaggacagagatgtgtaccttcaggggcccatctgggcaaagattccacacacggacggacattttcacccctctcccctcatgggtggattcggacttaaacaccctcctccacagattctcatcaagaacaccccggtacctgcgaatccttcgaccaccttcagtgcggcaaagtttgcttccttcatcacacagtactccacgggacaggtcagcgtggagatcgagtgggagctgcagaaggaaaacagcaaacgctggaatcccgaaattcagtacacttccaactacaacaagtctgttaatgtggactttactgtggacactaatggcgtgtattcagagcctcgccccattggcaccagatacctgactcgtaatctgtaa

SEQ ID NO: 12899 - DNA, 2208 bp, Artificial Sequence
  source: /note="Description of Artificial Sequence: Synthetic polynucleotide"
atggctgccgatggttatcttccagattggctcgaggacactctctctgaaggaataagacagtggtggaagctcaaacctggcccaccaccaccaaagcccgcagagcggcataaggacgacagcaggggtcttgtgcttcctgggtacaagtacctcggacccttcaacggactcgacaagggagagccggtcaacgaggcagacgccgcggccctcgagcacgacaaagcctacgaccggcagctcgacagcggagacaacccgtacctcaagtacaaccacgccgacgcggagtttcaggagcgccttaaagaagatacgtcttttgggggcaacctcggacgagcagtcttccaggcgaaaaagagggttcttgaacctctgggcctggttgaggaacctgttaagacggctccgggaaaaaagaggccggtagagcactctcctgtggagccagactcctcctcgggaaccggaaaggcgggccagcagcctgcaagaaaaagattgaattttggtcagactggagacgcagactcagtacctgacccccagcctctcggacagccaccagcagccccctctggtctgggaactaatacgatggctacaggcagtggcgcaccaatggcagacaataacgagggcgccgacggagtgggtaattcctcgggaaattggcattgcgattccacatggatgggcggcagagtcatcaccaccagcacccgaacctgggccctgcccacctacaacaaccacctctacaaacaaatttccagccaatcaggagcctcgaacgacaatcactactttggctacagcaccccttgggggtattttgacttcaacagattccactgccacttttcaccacgtgactggcaaagactcatcaacaacaactggggattccgacccaagagactcaacttcaagctctttaacattcaagtcaaagaggtcacgcagaatgacggtacgacgacgattgccaataaccttaccagcacggttcaggtgtttactgactcggagtaccagctcccgtacgtcctcggctcggcgcatcaaggatgcctcccgccgttcccagcagacgtcttcatggtgccacagtatggatacctcaccctgaacaacgggagtcaggcagtaggacgctcttcattttactgcctggagtactttccttctcagatgctgcgtaccggaaacaactttaccttcagctacacttttgaggacgttcctttccacagcagctacgctcacagccagagtctggaccgtctcatgaatcctctcatcgaccagtacctgtattacttgagcagaacaaacactccaagtggaaccaccacgcagtcaaggcttcagttttctcaggccggagcgagtgacattcgggaccagtctaggaactggcttcctggaccctgttaccgccagcagcgagtatcaaagacatctgcggataacaacaacagtgaatactcgtggactggagctaccaagtaccacctcaatggcagagactctctggtgaatccgggcccggccatggcaagccacaaggacgatgaagaaaagttttttcctcagagcggggttctcatctttgggaagcaaggctcagagaaaacaaatgtggacattgaaaaggtcatgattacagacgaagaggaaatcaggacaaccaatcccgtggctacggagcagtatggttctgtatctaccaacctccagagaggcaacagacaagcagctaccgcagatgtcaacacacaaggcgttcttccaggcatggtctggcaggacagagatgtgtaccttcaggggcccatctgggcaaagattccacacacggacggacattttcacccctctcccctcatgggtggattcggacttaaacaccctcctccacagattctcatcaagaacaccccggtacctgcgaatccttcgaccaccttcagtgcggcaaagtttgcttccttcatcacacagtactccacgggacaggtcagcgtggagatcgagtgggagctgcagaaggaaaacagcaaacgctggaatcccgaaattcagtacacttccaactacaacaagtctgttaatgtggactttactgtggacactaatggcgtgtattcagagcctcgccccattggcaccagatacctgactcgtaatctgtaa

SEQ ID NO: 12900 - DNA, 2208 bp, Artificial Sequence
  source: /note="Description of Artificial Sequence: Synthetic polynucleotide"
atggctgccgatggttatcttccagattggctcgaggacactctctctgaaggaataagacagtggtggaagctcaaacctggcccaccaccaccaaagcccgcagagcggcataaggacgacagcaggggtcttgtgcttcctgggtacaagtacctcggacccttcaacggactcgacaagggagagccggtcaacgaggcagacgccgcggccctcgagcacgacaaagcctacgaccggcagctcgacagcggagacaacccgtacctcaagtacaaccacgccgacgcggagtttcaggagcgccttaaagaagatacgtcttttgggggcaacctcggacgagcagtcttccaggcgaaaaagagggttcttgaacctctgggcctggttgaggaacctgttaagacggctccgggaaaaaagaggccggtagagcactctcctgtggagccagactcctcctcgggaaccggaaaggcgggccagcagcctgcaagaaaaagattgaattttggtcagactggagacgcagactcagtacctgacccccagcctctcggacagccaccagcagccccctctggtctgggaactaatacgatggctacaggcagtggcgcaccaatggcagacaataacgagggcgccgacggagtgggtaattcctcgggaaattggcattgcgattccacatggatgggcgacagagtcatcaccaccagcacccgaacctgggccctgcccacctacaacaaccacctctacaaacaaatttccagccaatcaggagcctcgaacgacaatcactactttggctacagcaccccttgggggtattttgacttcaacagattccactgccacttttcaccacgtgactggcaaagactcatcaacaacaactggggattccgacccaagagacccaacttcaagctctttaacattcaagtcaaagaggtcacgcagaatgacggtacgacgacgattgccaataaccttaccagcacggttcaggtgtttactgactcggagtaccagctcccgtacgtcctcggctcggcgcatcaaggatgcctcccgccgttcccagcagacgtcttcatggtgccacagtatggatacctcaccctgaacaacgggagtcaggcagtaggacgctcttcattttactgcctggagtactttccttctcagatgctgcgtaccggaaacaactttaccttcagctacacttttgaggacgttcctttccacagcagctacgctcacagccagagtctggaccgtctcatgaatcctctcatcgaccagtacctgtattacttgagcagaacaaacactccaagtggaaccaccacgcagtcaaggcttcagttttctcaggccggagcgagtgacattcgggaccagtctaggaactggcttcctggaccctgttaccgccagcagcgagtatcaaagacatctgcggataacaacaacagtgaatactcgtggactggagctaccaagtaccacctcaatggcagagactctctggtgaatccgggcccggccatggcaagccacaaggacgatgaagaaaagttttttcctcagagcggggttctcatctttgggaagcaaggctcagagaaaacaaatgtggacattgaaaaggtcatgactacagacgaagaggaaatcaggacaaccaatcccgtggctacggagcagtatggttctgtatctaccaacctccagagaggcaacagacaagcagctaccgcagatgtcaacacacaaggcgttcttccaggcatggtctggcaggacagagatgtgtaccttcaggggcccatctgggcaaagattccacacacggacggacattttcacccctctcccctcatgggtggattcggacttaaacaccctcctccacagattctcatcaagaacaccccggtacctgcgaatccttcgaccaccttcagtgcggcaaagtttgcttccttcatcacacagtactccacgggacaggtcagcgtggagatcgagtgggagctgcagaaggaaaacagcaaacgctggaatcccgaaattcagtacacttccaactacaacaagtctgttaatgtggactttactgtggacactaatggcgtgtattcagagcctcgccccattggcaccagatacctgactcgtaatctgtaa

SEQ ID NO: 12901 - DNA, 2208 bp, Artificial Sequence
  source: /note="Description of Artificial Sequence: Synthetic polynucleotide"
atggctgccgatggttatcttccagattggctcgaggacactctctctgaaggaataagacagtggtggaagctcaaacctggcccaccaccaccaaagcccgcagagcggcataaggacgacagcaggggtcttgtgcttcctgggtacaagtacctcggacccttcaacggactcgacaagggagagccggtcaacgaggcagacgccgcggccctcgagcacgacaaagcctacgaccggcagctcgacagcggagacaacccgtacctcaagtacaaccacgccgacgcggagtttcgggagcgccttaaagaagatacgtcttttgggggcaacctcggacgagcagtcttccaggcgaaaaagagggttcttgaacctctgggcctggttgaggaacctgttaagacggctccgggaaaaaagaggccggtagagcactctcctgtggagccagactcctcctcgggaaccggaaaggcgggccagcagcctgcaagaaaaagattgaattttggtcagactggagacgcagactcagtacctgacccccagcctctcggacagccaccagcagccccctctggtctgggaactaatacgatggctacaggcagtggcgcaccaatggcagacaataacgagggcgccgacggagtgggtaattcctcgggaaattggcattgcgattccacatggatgggcgacagagtcatcaccaccagcacccgaacctgggccctgcccacctacaacaaccacctctacaaacaaatttccagccaatcaggagcctcgaacgacaatcactactttggctacagcaccccttgggggtattttgacttcaacagattccactgccacttttcaccacgtgactggcaaagactcatcaacaacaactggggattccgacccaagagactcaacttcaagctctttaacattcaagtcaaagaggtcacgcagaatgacggtacgacgacgattgccaataaccttaccagcacggttcaggtgtttactgactcggagtaccagctcccgtacgtcctcggctcggcgcatcaaggatgcctcccgccgttcccagcagacgtcttcatggtgccacagtatggatacctcaccctgaacaacgggagtcaggcagtaggacgctcttcattttactgcctggagtactttccttctcagatgctgcgtaccggaaacaactttaccttcagctacacttttgaggacgttcctttccacagcagctacgctcacagccagagtctggaccgtctcatgaatcctctcatcgaccagtacctgtattacttgagcagaacaaacactccaagtggaaccaccacgcagtcaaggcttcagttttctcaggccggagcgagtgacattcgggaccagtctaggaactggcttcctggaccctgttaccgccagcagcgagtatcaaagacatctgcggataacaacaacagtgaatactcgtggactggagctaccaagtaccacctcaatggcagagactctctggtgaatccgggcccggccatggcaagccacaaggacgatgaagaaaagttttttcctcagagcggggttctcatctttgggaagcaaggctcagagaaaacaaatgtggacattgaaaaggtcatgactacagacgaagaggaaatcaggacaaccaatcccgtggctacggagcagtatggttctgtatctaccaacctccagagaggcaacagacaagcagctaccgcagatgtcaacacacaaggcgttcttccaggcatggtctggcaggacagagatgtgtaccttcaggggcccatctgggcaaagattccacacacggacggacattttcacccctctcccctcatgggtggattcggacttaaacaccctcctccacagattctcatcaagaacaccccggtacctgcgaatccttcgaccaccttcagtgcggcaaagtttgcttccttcatcacacagtactccacgggacaggtcagcgtggagatcgagtgggagctgcagaaggaaaacagcaaacgctggaatcccgaaattcagtacacttccaactacaacaagtctgttaatgtggactttactgtggacactaatggcgtgtattcagagcctcgccccattggcaccagatacctgactcgtaatctgtaa

SEQ ID NO: 12902 - DNA, 2208 bp, Artificial Sequence
  source: /note="Description of Artificial Sequence: Synthetic polynucleotide"
atggctgccgatggttatcttccagattggctcgaggacactctctctgaaggaataagacagtggtggaagctcaaacctggcccaccaccaccaaagcccgcagagcggcataaggacgacagcaggggtcttgtgcttcctgggtacaagtacctcggacccttcaacggactcgacaagggagagccggtcaacgaggcagacgccgcggccctcgagcacgacaaagcctacgaccggcagctcgacagcggagacaacccgtacctcaagtacaaccacgccgacgcggagtttcaggagcgccttaaagaagatacgtcttttgggggcaacctcggacgagcagtcttccaggcgaaaaagagggttcttgaacctctgggcctggttgaggaacctgttaagacggctccgggaaaaaagaggccggtagagcactctcctgtggagccagacccctcctcgggaaccggaaaggcgggccagcagcctgcaagaaaaagattgaattttggtcagactggagacgcagactcagtacctgacccccagcctctcggacagccaccagcagccccctctggtctgggaactaatacgatggctacaggcagtggcgcaccaatggcagacaataacgagggcgccgacggagtgggtaattcctcgggaaattggcattgcgattccacatggatgggcgacagagtcatcaccaccagcacccgaacctgggccctgcccacctacaacaaccacctctacaaacaaatttccagccaatcaggagcctcgaacgacaatcactactttggctacagcaccccttgggggtattttgacttcaacagattccactgccacttttcaccacgtgactggcaaagactcatcaacaacaactggggattccgacccaagagactcaacttcaagctctttaacattcaagtcaaagaggtcacgcagaatgacggtacgacgacgattgccaataaccttaccagcacggttcaggtgtttactgactcggagtaccagctcccgtacgtcctcggctcggcgcatcaaggatgcctcccgccgttcccagcagacgtcttcatggtgccacagtatggatacctcaccctgaacaacgggagtcaggcagtaggacgctcttcattttactgcctggagtactttccttctcagatgctgcgtaccggaaacaactttaccttcagctacacttttgaggacgttcctttccacagcagctacgctcacagccagagtctggaccgtctcatgaatcccctcatcgaccagtacctgtattacttgagcagaacaaacactccaagtggaaccaccacgcagtcaaggcttcagttttctcaggccggagcgagtgacattcgggaccagtctaggaactggcttcctggaccctgttaccgccagcagcgagtatcaaagacatctgcggataacaacaacagtgaatactcgtggactggagctaccaagtaccacctcaatggcagagactctctggtgaatccgggcccggccatggcaagccacaaggacgatgaagaaaagttttttcctcagagcggggttctcatctttgggaagcaaggctcagagaaaacaaatgtggacattgaaaaggtcatgattacagacgaagaggaaatcaggacaaccaatcccgtggctacggagcagtatggttctgtatctaccaacctccagagaggcaacagacaagcagctaccgcagatgtcaacacacaaggcgttcttccaggcatggtctggcaggacagagatgtgtaccttcaggggcccatctgggcaaagattccacacacggacggacattttcacccctctcccctcatgggtggattcggacttaaacaccctcctccacagattctcatcaagaacaccccggtacctgcgaatccttcgaccaccttcagtgcggcaaagtttgcttccttcatcacacagtactccacgggacaggtcagcgtggagatcgagtgggagctgcagaaggaaaacagcaaacgctggaatcccgaaattcagtacacttccaactacaacaagtctgttaatgtggactttactgtggacactaatggcgtgtattcagagcctcgccccattggcaccagatacctgactcgtaatctgtaa

SEQ ID NO: 12903 - DNA, 2208 bp, Artificial Sequence
  source: /note="Description of Artificial Sequence: Synthetic polynucleotide"
atggctgccgatggttatcttccagattggctcgaggacactctctctgaaggaataagacagtggtggaagctcaaacctggcccaccaccaccaaagcccgcagagcggcataaggacgacagcaggggtcttgtgcttcctgggtacaagtacctcggacccttcaacggactcgacaagggagagccggtcaacgaggcagacgccgcggccctcgagcacgacaaagcctacgaccggcagctcgacagcggagacaacccgtacctcaagtacaaccacgccgacgcggagtttcaggagcgccttaaagaagatacgtcttttgggggcaacctcggacgagcagtcttccaggcgaaaaagagggttcttgaacctctgggcctggttgaggaacctgttaagacggctccgggaaaaaagaggccggtagagcactctcctgtggagccagactcctcctcgggaaccggaaaggcgggccagcagcctgcaagaaaaagattgaattttggtcagactggagacgcagactcagtacctgacccccagcctctcggacagccaccagcagccccctctggtctgggaactaatacgatggctacaggcagtggcgcaccaatggcagacaataacgagggcgccgacggagtgggtaattcctcgggaaattggcattgcgattccacatggatgggcgacagagtcatcaccaccagcacccgaacctgggccctgcccacctacaacaaccacctctacaaacaaatttccagccaatcaggagcctcgaacgacaatcactactttggctacagcaccccttgggggtattttgacttcaacagattccactgccacttttcaccacgtgactggcaaagactcatcaacaacaactggggattccgacccaagagactcaacttcaagctctttaacattcaagtcaaagaggtcacgcagaatgacggtacgacgacgattgccaataaccttaccagcacggttcaggtgtttactgactcggagtaccagctcccgtacgtcctcggctcggcgcatcaaggatgcctcccgccgttcccagcagacgtcttcatggtgccacagtatggatacctcaccctgaacaacgggagtcaggcagtaggacgctcttcattttactgcctggagtactttccttctcagatgctgcgtaccggaaacaactttaccttcagctacacttttgaggacgttcctttccacagcagctacgctcacagccagagtctggaccgtctcatgaatcctctcatcgaccagtacctgtattacttgagcagaacaaacactccaagtggaaccaccacgcagtcaaggcttcagttttctcaggccggagcgagtgacattcgggaccagtctaggaactggcttcctggaccctgttaccgccagcagcgagtatcaaagacatctgcggataacaacaacagtgaatactcgtggactggagctaccaagtaccacctcaatggcagagactctctggtgaatccgggcccggccatggcaagccacaaggacgatgaagaaaagttttttcctcagagcggggttctcatctttgggaagcaaggctcagagaaaacaaatgtggacattgaaaaggtcatgattacagacgaagaggaaatcaggacaaccaatcccgtggctacggagcagtatggttctgtatctaccaacctccagagaggcaacagacaagcagctaccgcagatgtcaacacacaaggcgttcttccaggcatggtctggcaggacagagatgtgtaccttcaggggcccatctgggcaaagattccacacacggacggacattttcacccctctcccctcatgggtggattcggacttaaacaccctcctccacagattctcatcaagaacaccccggtacctgcgaatccttcgaccaccttcagtgcggcaaagtttgcttccttcatcacacagtactccacgggacaggtcagcgtggagatcgagtgggagctgcagaaggaaaacagcaaacgctggaatcccgaaattcagtacacttccaactacaacaagtctgttaatgtggactttactgtggacactaatggcgtgtattcagagtctcgccccattggcaccagatacctgactcgtaatctgtaa

SEQ ID NO: 12904 - DNA, 2208 bp, Artificial Sequence
  source: /note="Description of Artificial Sequence: Synthetic polynucleotide"
atggctgccgatggttatcttccagattggctcgaggacactctctctgaaggaataagacagtggtggaagctcaaacctggcccaccaccaccaaagcccgcagagcggcataaggacgacagcaggggtcttgtgcttcctgggtacaagtacctcggacccttcaacggactcgacaagggagagccggtcaacgaggcagacgccgcggccctcgagcacgacaaagcctacgaccggcagctcgacagcggagacaacccgtacctcaagtacaaccacgccgacgcggagtttcaggagcgccttaaagaagatacgtcttttgggggcaacctcggacgagcagtcttccaggcgaaaaagagggttcttgaacctctgggcctggttgaggaacctgttaagacggctccgggaaaaaagaggccggtagagcactctcctgtggagccagactcctcctcgggaaccggaaaggcgggccagcagcctgcaagaaaaagattgaattttggtcagactggagacgcagactcagtacctgacccccagcctctcggacagccaccagcagccccctctggtctgggaactaatacgatggctacaggcagtggcgcaccaatggcagacaataacgagggcgccgacggagtgggtaattcctcgggaaattggcattgcgattccacatggatgggcgacagagtcatcaccaccagcacccgaacctgggccctgcccacctacaacaaccacctctacaaacaaatttccagccaatcaggagcctcgaacgacaatcactactttggctacagcaccccttgggggtattttgacttcaacagattccactgccacttttcaccacgtgactggcaaagactcatcaacaacaactggggattccgacccaagagactcaacttcaagctctttaacattcaagtcaaagaggtcacgcagaatgacggtacgacgacgattgccaataaccttaccagcacggttcaggtgtttactgactcggagtaccagctcccgtacgtcctcggctcggcgcatcaaggatgcctcccgccgttcccagcagacgtcttcatggtgccacagtatggatacctcaccccgaacaacgggagtcaggcagtaggacgctcttcattttactgcctggagtactttccttctcagatgctgcgtaccggaaacaactttaccttcagctacacttttgaggacgttcctttccacagcagctacgctcacagccagagtctggaccgtctcatgaatcctctcatcgaccagtacctgtattacttgagcagaacaaacactccaagtggaaccaccacgcagtcaaggcttcagttttctcaggccggagcgagtgacattcgggaccagtctaggaactggcttcctggaccctgttaccgccagcagcgagtatcaaagacatctgcggataacaacaacagtgaatactcgtggactggagctaccaagtaccacctcaatggcagagactctctggtgaatccgggcccggccatggcaagccacaaggacgatgaagaaaagttttttcctcagagcggggttctcatctttgggaagcaaggctcagagaaaacaaatgtggacattgaaaaggtcatgattacagacgaagaggaaatcaggacaaccaatcccgtggctacggagcagtatggttctgtatctaccaacctccagagaggcaacagacaagcagctaccgcagatgtcaacacacaaggcgttcttccaggcatggtctggcaggacagagatgtgtaccttcaggggcccatctgggcaaagattccacacacggacggacattttcacccctctcccctcatgggtggattcggacttaaacaccctcctccacagattctcatcaagaacaccccggtacctgcgaatccttcgaccaccttcagtgcggcaaagtttgcttccttcatcacacagtactccacgggacaggtcagcgtggagatcgagtgggagctgcagaaggaaaacagcaaacgctggaatcccgaaattcagtacacttccaactacaacaagtctgttaatgtggactttactgtggacactaatggcgtgtattcagagcctcgccccattggcaccagatacctgactcgtaatctgtaa

SEQ ID NO: 12905 - DNA, 2208 bp, Artificial Sequence
  source: /note="Description of Artificial Sequence: Synthetic polynucleotide"
atggctgccgatggttatcttccagattggctcgaggacactctctctgaaggaataagacagtggtggaagctcaaacctggcccaccaccaccaaagcccgcagagcggcataaggacgacagcaggggtcttgtgcttcctgggtacaagtacctcggacccttcaacggactcgacaagggagagccggtcaacgaggcagacgccgcggccctcgagcacgacaaagcctacgaccggcagctcgacagcggagacaacccgtacctcaagtacaaccacgccgacgcggagtttcaggagcgccttaaagaagatacgtcttttgggggcaacctcggacgagcagtcttccaggcgaaaaagagggttcttgaacctctgggcctggttgaggaacctgttaagacggctccgggaaaaaagaggccggtagagcactctcctgtggagccagactcctcctcgggaaccggaaaggcgggccagcagcctgcaagaaaaagattgaattttggtcagactggagacgcagactcagtacctgacccccagcctctcggacagccaccagcagccccctctggtctgggaactaatacgatggctacaggcagtggcgcaccaatggcagacaataacgagggcgccgacggagtgggtaattcctcgggaaattggcattgcgattccacatggatgggcgacagagtcatcaccaccagcacccgaacctgggccctgcccacctacaacaaccacctctacaaacaaatttccagccaatcaggagcctcgaacgacaatcactactttggctacagcaccccttgggggtattttgacttcaacagattccactgccacttttcaccacgtgactggcaaagactcatcaacaacaactggggattccgacccaagagactcaacttcaagctctttaacattcaagtcaaagaggtcacgcagaatgacggtacgacgacgattgccaataaccttaccagcacggttcaggtgtttactgactcggagtaccagctcccgtacgtcctcggctcggcgcatcaaggatgcctcccgccgttcccagcagacgtcttcatggtgccacagtatggatacctcaccctgaacaacgggagtcaggcagtaggacgctcttcattttactgcctggagtactttccttctcagatgctgcgtaccggaaacaactttaccttcagctacacttttgaggacgttcctttccacagcagctacgctcacagccagagtctggaccgtctcatgaatcctctcatcgaccagtacctgtattacttgagcagaacaaacactccaagtggaaccaccacgcagtcaaggcttcagttttctcaggccggagcgagtgacattcgggaccagtctaggaactggcttcctggaccctgttaccgccagcagcgagtatcaaagacatctgcggataacaacaacagtgaatactcgtggactggagctaccaagtaccacctcaatggcagagactctctggtgaatccgggcccggccatggcaagccacaaggacgatgaagaaaagttttttcctcagagcggggttctcatctttgggaagcaaggctcagagaaaacaaatgtggacattgaaaaggtcatgattacagacgaagaggaaatcaggacaaccaatcccgtggctacggagcagtatggttctgtatctaccaacctccagagaggcaacagacaagcagctaccgcagatgtcaacacacaaggcgttcttccaggcatggcctggcaggacagagatgtgtaccttcaggggcccatctgggcaaagattccacacacggacggacattttcacccctctcccctcatgggtggattcggacttaaacaccctcctccacagattctcatcaagaacaccccggtacctgcgaatccttcgaccaccttcagtgcggcaaagtttgcttccttcatcacacagtactccacgggacaggtcagcgtggagatcgagtgggagctgcagaaggaaaacagcaaacgctggaatcccgaaattcagtacacttccaactacaacaagtctgttaatgtggactttactgtggacactaatggcgtgtattcagagcctcgccccattggcaccagatacctgactcgtaatctgtaa

SEQ ID NO: 12906 - DNA, 2208 bp, Artificial Sequence
  source: /note="Description of Artificial Sequence: Synthetic polynucleotide"
atggctgccgatggttatcttccagattggctcgaggacactctctctgaaggaataagacagtggtggaagctcaaacctggcccaccaccgccaaagcccgcagagcggcacaaggacgacagtaggggtcttgtgcttcctgggtacaagtacctcggacccttcaacggactcgacaaaggagagccggtcaacgaggcagacgccgcggccctcgagcacgacaaggcctacgaccggcagctcgacagcggagacaacccgtacctcaagtacaaccacgccgacgcggagtttcaggagcgtcttaaagaagatacgtcttttgggggcaacctcggacgagcagtattccaggcgaaaaagagggttcttgaacctctgggcctggttgaggagcctgttaagacggctccgggaaaaaagaggccggtagagcactctcctgtggagccagactcctcctcgggaaccggaaaagcgggccagcagcctgcaagaaaaagattgaattttggtcagactggagacgcagactccgtacctgacccccagcctctcggacagccaccagcagcccccacaagtttgggatctactacaatggctacaggcagtggcgcaccaatggcagacaataacgagggtgccgatggagtgggtaattcctcaggaaattggcattgcgattcccaatggctgggcgacagagtcatcaccaccagcacccgaacctgggccctgcccacctacaacaaccacctctacaagcaaatctccagccaatcaggagcatcgaacgacaaccactactttggccacagcaccccttgggggtattttgacttcaacagattccactgtcacttctccccacgtgactggcaaagactcatcaacaacaactggggattccgacccaagagactcaacttcaagctctttaacattcaagtcaaagaggtcacgcagaatgacggtacgacgacgattgccaataaccttaccagcacggttcaggtgtttactgactcggagtaccagctcccgtacgtcctcggctcggcgcatcaaggatgcctcccgccgttcccagcagacgtcttcatggtcccacagtatggatacctcaccctgaacaacgggagtcaggcggtaggacgctcttccttttactgcctggagtactttccttctcagatgctgcgtaccggaaacaactttaccttcagctacacttttgaggacgttcctttccacagcagctacgctcacagccagagtctggaccgtctcatgaatcctctcatcgaccagtacctgtattacttgagcagaacaaacactccaagtggaaccaccacgcagtcaaggcttcagttttctcaggccggagcgagtgacattcgggaccagtctaggaactggcttcctggaccctgttaccgccagcagcgagtatcaaagacatctgcggataacaacaacagtgaatactcgtggactggagctaccaagtaccacctcaatggcagagactctctggtgaatccgggcccggccatggcaagccacaaggacgatgaagaaaagttttttcctcagagcggggttctcatctttgggaagcaaggctcagagaaaacaaatgtggacattgaaaaggtcatgattacagacgaagaggaaatcaggacaaccaatcccgtggctacggagcagtatggttctgtatctaccaacctccagagaggcaacagacaagcagctaccgcagatgtcaacacacaaggcgttcttccaggcatggtctggcaggacagagatgtgtaccttcaggggcccatctgggcaaagattccacacacggacggacattttcacccctctcccctcatgggtggattcggacttaaacaccctcctccacagattctcatcaagaacaccccggtacctgcgaatccttcgaccaccttcagtgcggcaaagtttgcttccttcatcacacagtactccacgggacaggtcagcgtggagatcgagtgggagctgcagaaggaaaacagcaaacgctggaatcccgaaattcagtacacttccaactacaacaagtctgttaatgtggactttactgtggacactaatggcgtgtattcagagcctcgccccattggcaccagatacctgactcgtaatctgtaa

SEQ ID NO: 12907 - DNA, 2208 bp, Artificial Sequence
  source: /note="Description of Artificial Sequence: Synthetic polynucleotide"
atggctgccgatggttatcttccagattggctcgaggacactctctctgaaggaataagacagtggtggaagctcaaacctggcccaccaccaccaaagcccgcagagcggcataaggacgacagcaggggtcttgtgcttcctgggtacaagtacctcggacccttcaacggactcgacaagggagagccggtcaacgaggcagacgccgcggccctcgagcacgacaaagcctacgaccggcagctcgacagcggagacaacccgtacctcaagtacaaccacgccgacgcggagtttcaggagcgccttaaagaagatacgtcttttgggggcaacctcggacgagcagtcttccaggcgaaaaagagggttcttgaacctctgggcctggttgaggaacctgttaagacggctccgggaaaaaagaggccggtagagcactctcctgtggagccagactcctcctcgggaaccggaaaggcgggccagcagcctgcaagaaaaagattgaattttggtcagactggagacgcagactcagtacctgacccccagcctctcggacagccaccagcagccccctctggtctgggaactaatacgatggctacaggcagtggcgcaccaatggcagacaataacgagggcgccgacggagtgggtaattcctcgggaaattggcattgcgattccacatggatgggcgacagagtcatcaccaccagcacccgaacctgggccctgcccacctacaacaaccacctctacaaacaaatttccagccaatcaggagcctcgaacgacaatcactactttggctacagcaccccttgggggtattttgacttcaacagattccactgccacttttcaccacgtgactggcaaagactcatcaacaacaactggggattccgacccaagagactcaacttcaagctctttaacattcaagtcaaagaggtcacgcagaatgacggtacgacgacgattgccaataaccttaccagcacggttcaggtgtttactgactcggagtaccagctcccgtacgtcctcggctcggcgcatcaaggatgcctcccgccgttcccagcagacgtcttcatggtgccacagtatggatacctcaccctgaacaacgggagtcaggcagtaggacgctcttcattttactgcctggagtactttccttctcagatgctgcgtaccggaaacaactttaccttcagctacacttttgaggacgttcctttccacagcagctacgctcacagccagagtctggaccgtctcatgaatcctctcatcgaccagtacctgtattacttgagcagaacaaacactccaagtggaaccaccacgcagtcaaggcttcagttttctcaggccggagcgagtgacattcgggaccagtctaggaactggcttcctggaccctgttaccgccagcagcgagtatcaaagacatctgcggataacaacaacagtgaatactcgtggactggagctaccaagtaccacctcaatggcagagactctctggtgaatccgggcccggccatggcaagccacaaggacgatgaagaaaagttttttcctcagagcggggttctcatctttgggaagcaaggctcagagaaaacaaatgtggacattgaaaaggtcatgattacagacgaagaggaaatcaggacaaccaatcccgtggctacggagcagtatggttctgtatctaccaacctccagagaggcaacagacaagcagctaccgcagatgtcaacacacaaggcgttcttccaggcatggtctggcaggacagagatgtgtaccttcaggggcccatctgggcaaagattccacacacggacggacattttcacccctctcccctcatgggtggattcggacttaaacaccctcctccacagattctcatcaagaacaccccggtacctgcgaatccttcgaccaccttcagtgcggcaaagtttgcttccttcatcacacagtactccacgggacaggccagcgtggagatcgagtgggagctgcagaaggaaaacagcaaacgctggaatcccgaaattcagtacacttccaactacaacaagtctgttaatgtggactttactgtggacactaatggcgtgtattcagagcctcgccccattggcaccagatacctgactcgtaatctgtaa

SEQ ID NO: 12908 - DNA, 2208 bp, Artificial Sequence
  source: /note="Description of Artificial Sequence: Synthetic polynucleotide"
atggctgccgatggttatcttccagattggctcgaggacactctctctgaaggaataagacagtggtggaagctcaaacctggcccaccaccaccaaagcccgcagagcggcataaggacgacagcaggggtcttgtgcttcctgggtacaagtacctcggacccttcaacggactcgacaagggagagccggtcaacgaggcagacgccgcggccctcgagcacgacaaagcctacgaccggcagctcgacagcggagacaacccgtacctcaagtacaaccacgccgacgcggagtttcaggagcgccttaaagaagatacgtcttttgggggcaacctcggacgagcagtcttccaggcgaaaaagagggttcttgaacctctgggcctggttgaggaacctgttaagacggctccgggaaaaaagaggccggtagagcactctcctgtggagccagactcctcctcgggaaccggaaaggcgggccagcagcctgcaagaaaaagattgaattttggtcagactggagacgcagactcagtacctgacccccagcctctcggacagccaccagcagccccctctggtctgggaactaatacgatggctacaggcagtggcgcaccaatggcagacaataacgagggcgccgacggagtgggtaattcctcgggaaattggcattgcgattccacatggatgggcgacagagtcatcaccaccagcacccgaacctgggccctgcccacctacaacaaccacctctacaaacaaatttccagccaatcaggagcctcgaacgacaatcactactttggctacagcaccccttgggggtattttgacttcaacagattccactgccacttttcaccacgtgactggcaaagactcatcaacaacaactggggattccgacccaagagactcaacttcaagctctttaacattcaagtcaaagaggtcacgcagaatgacggtacgacgacgattgccaataaccttaccagcacggttcaggtgtttactgactcggagtaccagctcccgtacgtcctcggctcggcgcatcaaggatgcctcccgccgttcccagcagacgtcttcatggtgccacagtatggatacctcaccctgaacaacgggagtcaggcagtaggacgctcttcattttactgcctggagtactttccttctcagatgctgcgtaccggaaacaactttaccttcagctacacttttgaggacgttcctttccacagcagctacgctcacagccagagtctggaccgtctcatgaatcctctcatcgaccagtacctgtattacttgagcagaacaaacactccaagtggaaccaccacgcagtcaaggcttcagttttctcaggccggagcgagtgacattcgggaccagtctaggaactggcttcctggaccctgttaccgccagcagcgagtatcaaagacatctgcggataacaacaacagtgaatactcgtggactggagctaccaagtaccacctcaatggcagagactctctggtgaatccgggcccggccatggcaagccacaaggacgatgaagaaaagttttttcctcagagcggggttctcatctttgggaagcaaggctcagagaaaacaaatgtggacattgaaaaggtcatgattacagacgaagaggaaatcaggacaaccaatcccgtggctacggagcagtatggttctgtatctaccaacctccagagaggcaacagacaagcagctaccgcagatgtcaacacacaaggcgttcttccaggcatggtctggcaggacagagatgtgtaccttcaggggcccatctgggcaaagattccacacacggacggacattttcacccctctcccctcatgggtggattcggacttaaacaccctcctccacagattctcatcaagaacaccccggtacctgcgaatccttcgaccaccttcagtgcggcaaggtttgcttccttcatcacacagtactccacgggacaggtcagcgtggagatcgagtgggagctgcagaaggaaaacagcaaacgctggaatcccgaaattcagtacacttccaactacaacaagtctgttaatgtggactttactgtggacactaatggcgtgtattcagagcctcgccccattggcaccagatacctgactcgtaatctgtaa

SEQ ID NO: 12909 - DNA, 2208 bp, Artificial Sequence
  source: /note="Description of Artificial Sequence: Synthetic polynucleotide"
atggctgccgatggttatcttccagattggctcgaggacactctctctgaaggaataagacagtggtggaagctcaaacctggcccaccaccaccaaagcccgcagagcggcataaggacgacagcaggggtcttgtgcttcctgggtacaagtacctcggacccttcaacggactcgacaagggagagccggtcaacgaggcagacgccgcggccctcgagcacgacaaagcctacgaccggcagctcgacagcggagacaacccgtacctcaagtacaaccacgccgacgcggagtttcaggagcgccttaaagaagatacgtcttttgggggcaacctcggacgagcagtcttccaggcgaaaaagagggttcttgaacctctgggcctggttgaggaacctgttaagacggctccgggaaaaaagaggccggtagagcactctcctgtggagccagactcctcctcgggaaccggaaaggcgggccagcagcctgcaagaaaaagattgaattttggtcagactggaggcgcagactcagtacctgacccccagcctctcggacagccaccagcagccccctctggtctgggaactaatacgatggctacaggcagtggcgcaccaatggcagacaataacgagggcgccgacggagtgggtaattcctcgggaaattggcattgcgattccacatggatgggcgacagagtcatcaccaccagcacccgaacctgggccctgcccacctacaacaaccacctctacaaacaaatttccagccaatcaggagcctcgaacgacaatcactactttggctacagcaccccttgggggtattttgacttcaacagattccactgccacttttcaccacgtgactggcaaagactcatcaacaacaactggggattccgacccaagagactcaacttcaagctctttaacattcaagtcaaagaggtcacgcagaatgacggtacgacgacgattgccaataaccttaccagcacggttcaggtgtttactgactcggagtaccagctcccgtacgtcctcggctcggcgcatcaaggatgcctcccgccgttcccagcagacgtcttcatggtgccacagtatggatacctcaccctgaacaacgggagtcaggcagtaggacgctcttcattttactgcctggagtactttccttctcagatgctgcgtaccggaaacaactttaccttcagctacacttttgaggacgttcctttccacagcagctacgctcacagccagagtctggaccgtctcatgaatcctctcatcgaccagtacctgtattacttgagcagaacaaacactccaagtggaaccaccacgcagtcaaggcttcagttttctcaggccggagcgagtgacattcgggaccagtctaggaactggcttcctggaccctgttaccgccagcagcgagtatcaaagacatctgcggataacaacaacagtgaatactcgtggactggagctaccaagtaccacctcaatggcagagactctctggtgaatccgggcccggccatggcaagccacaaggacgatgaagaaaagttttttcctcagagcggggttctcatctttgggaagcaaggctcagagaaaacaaatgtggacattgaaaaggtcatgattacagacgaagaggaaatcaggacaaccaatcccgtggctacggagcagtatggttctgtatctaccaacctccagagaggcaacagacaagcagctaccgcagatgtcaacacacaaggcgttcttccaggcatggtctggcaggacagagatgtgtaccttcaggggcccatctgggcaaagattccacacacggacggacattttcacccctctcccctcatgggtggattcggacttaaacaccctcctccacagattctcatcaagaacaccccggtacctgcgaatccttcgaccaccttcagtgcggcaaagtttgcttccttcatcacacagtactccacgggacaggtcagcgtggagatcgagtgggagctgcagaaggaaaacagcaaacgctggaatcccgaaattcagtacacttccaactacaacaagtctgttaatgtggactttactgtggacactaatggcgtgtattcagagcctcgccccattggcaccagatacctgactcgtaatctgtaa

SEQ ID NO: 12910 - DNA, 2208 bp, Artificial Sequence
  source: /note="Description of Artificial Sequence: Synthetic polynucleotide"
atggctgccgatggttatcttccagattggctcgaggacactctctctgaaggaataagacagtggtggaagctcaaacctggcccaccaccaccaaagcccgcagagcggcataaggacgacagcaggggtcttgtgcttcctgggtacaagtacctcggacccttcaacggactcgacaagggagagccggtcaacgaggcagacgccgcggccctcgagcacgacaaagcctacgaccggcagctcgacagcggagacaacccgtacctcaagtacaaccacgccgacgcggagtttcaggagcgccttaaagaagatacgtcttttgggggcaacctcggacgagcagtcttccaggcgaaaaagagggttcttgaacctctgggcctggttgaggaacctgttaagacggctccgggaaaaaagaggccggtagagcactctcctgtggagccagactcctcctcgggaaccggaaaggcgggccagcagcctgcaagaaaaagattgaattttggtcagactggagacgcagactcagtacctgacccccagcctctcggacagccaccagcagccccctctggtctgggaactaatacgatggctacaggcagtggcgcaccaatggcagacaataacgagggcgccgacggagtgggtaattcctcgggaaattggcattgcgattccacatggatgggcgacagagtcatcaccaccagcacccgaacctgggccctgcccacctacaacaaccacctctacaaacaaatttccagccaatcaggagcctcgaacgacaatcactactttggctacagcaccccttgggggtattttgacttcaacagattccactgccacttttcaccacgtgactggcaaagactcatcaacaacaactggggattccgacccaagagactcaacttcaagctctttaacattcaagtcaaagaggtcacgcagaatgacggtacgacgacgattgccaataaccttaccagcacggttcaggtgtttactgactcggagtaccagctcccgtacgtcctcggctcggcgcatcaaggatgcctcccgccgttcccagcagacgtcttcatggtgccacagtatggatacctcaccctgaacaacgggagtcaggcagtaggacgctcttcattttactgcctggagtactttccttctcagatgctgcgtaccggaaacaactttaccttcagctacacttttgaggacgttcctttccacagcagctacgctcacagccagagtctggaccgtctcatgaatcctctcatcgaccagtacctgtattacttgagcagaacaaacactccaagtggaaccaccacgcagtcaaggcttcagttttctcaggccggagcgagtgacattcgggaccagtctaggaactggcttcctggaccctgttaccgccagcagcgagtatcaaagacatctgcggataacaacaacagtgaatactcgtggactggagctaccaagtaccacctcaatggcagagactctctggtgaatccgggcccggccatggcaagccacaaggacgatgaagaaaagttttttcctcagagcggggttctcatctttgggaagcaaggctcagagaaaacaaatgtggacattgaaaaggtcatgattacagacgaagaggaaatcaggacaaccaatcccgtggctacggagcagtatggttctgtatctaccaacctccagagaggcaacagacaagcagctaccgcagatgtcaacacacaaggcgttcttccaggcatggtctggcaggacagagatgtgtaccttcaggggcccatctgggcaaagattccacacacggacggacattttcacccctctcccctcatgggtggattcggacttaaacaccctcctccacagattctcatcaagaacaccccggtacctgcgaatccttcgaccaccttcagtgcggcaaagtttgcttccttcatcacacagtactccacgggacaggtcagcgtggagatcgagtgggagctgcagaaggaaaacagcaaacgctggaatcccgaaattcagtacacttccaactacaacaagtctgctaatgtggactttactgtggacactaatggcgtgtattcagagcctcgccccattggcaccagatacctgactcgtaatctgtaa

SEQ ID NO: 12911 - DNA, 2208 bp, Artificial Sequence
  source: /note="Description of Artificial Sequence: Synthetic polynucleotide"
atggctgccgatggttatcttccagattggctcgaggacactctctctgaaggaataagacagtggtggaagctcaaacctggcccaccaccaccaaagcccgcagagcggcataaggacgacagcaggggtcttgtgcttcctgggtacaagtacctcggacccttcaacggactcgacaagggagagccggtcaacgaggcagacgccgcggccctcgagcacgacaaagcctacgaccggcagctcgacagcggagacaacccgtacctcaagtacaaccacgccgacgcggagtttcaggagcgccttaaagaagatacgtcttttgggggcaacctcggacgagcagtcttccaggcgaaaaagagggttcttgaacctctgggcctggttgaggaacctgttaagacggctccgggaaaaaagaggccggtagagcactctcctgtggagccagactcctcctcgggaaccggaaaggcgggccagcagcctgcaagaaaaagattgaattttggtcagactggagacgcagactcagtacctgacccccagcctctcggacagccaccagcagccccctctggtctgggaactaatacgatggctacaggcagtggcgcaccaatggcagacaataacgagggcgccgacggagtgggtaattcctcgggaaattggcattgcgattccacatggatgggcgacagagtcatcaccaccagcacccgaacctgggccctgcccacctacaacaaccacctctacaaacaaatttccagccaatcaggagcctcgaacgacaatcactactttggctacagcaccccttgggggtattttgacttcaacagattccactgccacttttcaccacgtgactggcaaagactcatcaacaacaactggggattccgacccaagagactcaacttcaagctctttaacattcaagtcaaagaggtcacgcagaatgacggtacgacgacgattgccaataaccttaccagcacggttcaggtgtttactgactcggagtaccagctcccgtacgtcctcggctcggcgcatcaaggatgcctcccgccgttcccagcagacgtcttcatggtgccacagtatggatacctcaccctgaacaacgggagtcaggcagtaggacgctcttcattttactgcctggagtactttccttctcagatgctgcgtaccggaaacaactttaccttcagctacacttttgaggacgttcctttccacagcagctacgctcacagccagagtctggaccgtctcatgaatcctctcatcgaccagtacctgtattacttgagcagaacaaacactccaagtggaaccaccacgcagtcaaggcttcagttttctcaggccggagcgagtgacattcgggaccggtctaggaactggcttcctggaccctgttaccgccagcagcgagtatcaaagacatctgcggataacaacaacagtgaatactcgtggactggagctaccaagtaccacctcaatggcagagactctctggtgaatccgggcccggccatggcaagccacaaggacgatgaagaaaagttttttcctcagagcggggttctcatctttgggaagcaaggctcagagaaaacaaatgtggacattgaaaaggtcatgattacagacgaagaggaaatcaggacaaccaatcccgtggctacggagcagtatggttctgtatctaccaacctccagagaggcaacagacaagcagctaccgcagatgtcaacacacaaggcgttcttccaggcatggtctggcaggacagagatgtgtaccttcaggggcccatctgggcaaagattccacacacggacggacattttcacccctctcccctcatgggtggattcggacttaaacaccctcctccacagattctcatcaagaacaccccggtacctgcgaatccttcgaccaccttcagtgcggcaaagtttgcttccttcatcacacagtactccacgggacaggtcagcgtggagatcgagtgggagctgcagaaggaaaacagcaaacgctggaatcccgaaattcagtacacttccaactacaacaagtctgttaatgtggactttactgtggacactaatggcgtgtattcagagcctcgccccattggcaccagatacctgactcgtaatctgtaa

SEQ ID NO: 12912 - DNA, 2208 bp, Artificial Sequence
  source: /note="Description of Artificial Sequence: Synthetic polynucleotide"
atggctgccgatggttatcttccagattggctcgaggacactctctctgaaggaataagacagtggtggaagctcaaacctggcccaccaccaccaaagcccgcagagcggcataaggacgacagcaggggtcttgtgcttcctgggtacaagtacctcggacccttcaacggactcgacaagggagagccggtcaacgaggcagacgccgcggccctcgagcacgacaaagcctacgaccggcagctcgacagcggagacaacccgtacctcaagtacaaccacgccgacgcggagtttcaggagcgccttaaagaagatacgtcttttgggggcaacctcggacgagcagtcttccaggcgaaaaagagggttcttgaacctctgggcctggttgaggaacctgttaagacggctccgggaaaaaagaggccggtagagcactctcctgtggagccagactcctcctcgggaaccggaaaggcgggccagcagcctgcaagaaaaagattgaattttggtcagactggagacgcagactcagtacctgacccccagcctctcggacagccaccagcagccccctctggtctgggaactaatacgatggctacaggcagtggcgcaccaatggcagacaataacgagggcgccgacggagtgggtaattcctcgggaaattggcattgcgattccacatggatgggcgacagagtcatcaccaccagcacccgaacctgggccctgcccacctacaacaaccacctctacaaacaaatttccagccaatcaggagcctcgaacgacaatcactactttggctacagcaccccttgggggtattttgacttcaacagattccactgccacttttcaccacgtgactggcaaagactcatcaacaacaactggggattccgacccaagagactcaacttcaagctctttaacattcaagtcaaagaggtcacgcagaatgacggtacgacgacgattgccaataaccttaccagcacggttcaggtgtttactgactcggagtaccagctcccgtacgtcctcggctcggcgcatcaaggatgcctcccgccgttcccagcagacgtcttcatggtgccacagtatggatacctcaccctgaacaacgggagtcaggcagtaggacgctcttcattttactgcctggagtactttccttctcagatgctgcgtaccggaaacaactttaccttcagctacacttttgaggacgttcctttccacagcagctacgctcacagccagagtctggaccgtctcatgaatcctctcatcgaccagtacctgtattacttgagcagaacaaacactccaagtggaaccaccacgcagtcaaggcttcagttttctcaggccggagcgagtgacattcgggaccagtctaggaactggcttcctggaccctgttaccgccagcagcgagtatcaaaggcatctgcggataacaacaacagtgaatactcgtggactggagctaccaagtaccacctcaatggcagagactctctggtgaatccgggcccggccatggcaagccacaaggacgatgaagaaaagttttttcctcagagcggggttctcatctttgggaagcaaggctcagagaaaacaaatgtggacattgaaaaggtcatgattacagacgaagaggaaatcaggacaaccaatcccgtggctacggagcagtatggttctgtatctaccaacctccagagaggcaacagacaagcagctaccgcagatgtcaacacacaaggcgttcttccaggcatggtctggcaggacagagatgtgtaccttcaggggcccatctgggcaaagattccacacacggacggacattttcacccctctcccctcatgggtggattcggacttaaacaccctcctccacagattctcatcaagaacaccccggtacctgcgaatccttcgaccaccttcagtgcggcaaagtttgcttccttcatcacacagtactccacgggacaggtcagcgtggagatcgagtgggagctgcagaaggaaaacagcaaacgctggaatcccgaaattcagtacacttccaactacaacaagtctgttaatgtggactttactgtggacactaatggcgtgtattcagagcctcgccccattggcaccagatacctgactcgtaatctgtaa

SEQ ID NO: 12913 - DNA, 2208 bp, Artificial Sequence
  source: /note="Description of Artificial Sequence: Synthetic polynucleotide"
atggctgccgatggttatcttccagattggctcgaggacactctctctgaaggaataagacagtggtggaagctcaaacctggcccaccaccaccaaagcccgcagagcggcataaggacgacagcaggggtcttgtgcttcctgggtacaagtacctcggacccttcaacggactcgacaagggagagccggtcaacgaggcagacgccgcggccctcgagcacgacaaagcctacgaccggcagctcgacagcggagacaacccgtacctcaagtacaaccacgccgacgcggagtttcaggagcgccttaaagaagatacgtcttttgggggcaacctcggacgagcagtcttccaggcgaaaaagagggttcttgaacctctgggcctggttgaggaacctgttaagacggctccgggaaaaaagaggccggtagagcactctcctgtggagccagactcctcctcgggaaccggaaaggcgggccagcagcctgcaagaaaaagattgaattttggtcagactggagacgcagactcagtacctgacccccagcctctcggacagccaccagcagccccctctggtctgggaactaatacgatggctacaggcagtggcgcaccaatggcagacaataacgagggcgccgacggagtgggtaattcctcgggaaattggcattgcgattccacatggatgggcgacagagtcatcaccaccagcacccgaacctgggccctgcccacctacaacaaccacctctacaaacaaatttccagccaatcaggagcctcgaacgacaatcactactttggctacagcaccccttgggggtattttgacttcaacagattccactgccacttttcaccacgtgactggcaaagactcatcaacaacaactggggattccgacccaagagactcaacttcaagctctttaacattcaagtcaaagaggtcacgcagaatgacggtacgacgacgattgccaataaccttaccagcacggttcaggtgtttactgactcggagtaccagctcccgtacgtcctcggctcggcgcatcaaggatgcctcccgccgttcccagcagacgtcttcatggtgccacagtatggatacctcaccctgaacaacgggagtcaggcagtaggacgctcttcattttactgcctggagtactttccttctcagatgctgcgtaccggaaacaactttaccttcagctacacttttgaggacgttcctttccacagcagctacgctcacagccagagtctggaccgtctcatgaatcctctcatcgaccagtacctgtattacttgagcagaacaaacactccaagtggaaccaccacgcagtcaaggcttcagttttctcaggccggagcgagtgacattcgggaccagtctaggaactggcttcctggaccctgttaccgccagcagcgagtatcaaagacatctgcggataacaacaacagtgaatactcgtggactggagctaccaagcaccacctcaatggcagagactctctggtgaatccgggcccggccatggcaagccacaaggacgatgaagaaaagttttttcctcagagcggggttctcatctttgggaagcaaggctcagagaaaacaaatgtggacattgaaaaggtcatgattacagacgaagaggaaatcaggacaaccaatcccgtggctacggagcagtatggttctgtatctaccaacctccagagaggcaacagacaagcagctaccgcagatgtcaacacacaaggcgttcttccaggcatggtctggcaggacagagatgtgtaccttcaggggcccatctgggcaaagattccacacacggacggacattttcacccctctcccctcatgggtggattcggacttaaacaccctcctccacagattctcatcaagaacaccccggtacctgcgaatccttcgaccaccttcagtgcggcaaagtttgcttccttcatcacacagtactccacgggacaggtcagcgtggagatcgagtgggagctgcagaaggaaaacagcaaacgctggaatcccgaaattcagtacacttccaactacaacaagtctgttaatgtggactttactgtggacactaatggcgtgtattcagagcctcgccccattggcaccagatacctgactcgtaatctgtaa

SEQ ID NO: 12914 - DNA, 2208 bp, Artificial Sequence
  source: /note="Description of Artificial Sequence: Synthetic polynucleotide"
atggctgccgatggttatcttccagattggctcgaggacactctctctgaaggaataagacagtggtggaagctcaaacctggcccaccaccaccaaagcccgcagagcggcataaggacgacagcaggggtcttgtgcttcctgggtacaagtacctcggacccttcaacggactcgacaagggagagccggtcaacgaggcagacgccgcggccctcgagcacgacaaagcctacgaccggcagctcgacagcggagacaacccgtacctcaagtacaaccacgccgacgcggagtttcaggagcgccttaaagaagatacgtcttttgggggcaacctcggacgagcagtcttccaggcgaaaaagagggttcttgaacctctgggcctggttgaggaacctgttaagacggctccgggaaaaaagaggccggtagagcactctcctgtggagccagactcctcctcgggaaccggaaaggcgggccagcagcctgcaagaaaaagattgaattttggtcagactggagacgcagactcagtacctgacccccagcctctcggacagccaccagcagccccctctggtctgggaactaatacgatggctacaggcagtggcgcaccaatggcagacaataacgagggcgccgacggagtgggtaattcctcgggaaattggcattgcgattccacatggatgggcgacagagtcatcaccaccagcacccgaacctgggccctgcccacctacaacaaccacctctacaaacaaatttccagccaatcaggagcctcgaacgacaatcactactttggctacagcaccccttgggggtattttgacttcaacagattccactgccacttttcaccacgtgactggcaaagactcatcaacaacaactggggattccgacccaagagactcaacttcaagctctttaacattcaagtcaaagaggtcacgcagaatgacggtacgacgacgattgccaataaccttaccggcacggttcaggtgtttactgactcggagtaccagctcccgtacgtcctcggctcggcgcatcaaggatgcctcccgccgttcccagcagacgtcttcatggtgccacagtatggatacctcaccctgaacaacgggagtcaggcagtaggacgctcttcattttactgcctggagtactttccttctcagatgctgcgtaccggaaacaactttaccttcagctacacttttgaggacgttcctttccacagcagctacgctcacagccagagtctggaccgtctcatgaatcctctcatcgaccagtacctgtattacttgagcagaacaaacactccaagtggaaccaccacgcagtcaaggcttcagttttctcaggccggagcgagtgacattcgggaccagtctaggaactggcttcctggaccctgttaccgccagcagcgagtatcaaagacatctgcggataacaacaacagtgaatactcgtggactggagctaccaagtaccacctcaatggcagagactctctggtgaatccgggcccggccatggcaagccacaaggacgatgaagaaaagttttttcctcagagcggggttctcatctttgggaagcaaggctcagagaaaacaaatgtggacattgaaaaggtcatgattacagacgaagaggaaatcaggacaaccaatcccgtggctacggagcagtatggttctgtatctaccaacctccagagaggcaacagacaagcagctaccgcagatgtcaacacacaaggcgttcttccaggcatggtctggcaggacagagatgtgtaccttcaggggcccatctgggcaaagattccacacacggacggacattttcacccctctcccctcatgggtggattcggacttaaacaccctcctccacagattctcatcaagaacaccccggtacctgcgaatccttcgaccaccttcagtgcggcaaagtttgcttccttcatcacacagtactccacgggacaggtcagcgtggagatcgagtgggagctgcagaaggaaaacagcaaacgctggaatcccgaaattcagtacacttccaactacaacaagtctgttaatgtggactttactgtggacactaatggcgtgtattcagagcctcgccccattggcaccagatacctgactcgtaatctgtaa

SEQ ID NO: 12915 - DNA, 2208 bp, Artificial Sequence
  source: /note="Description of Artificial Sequence: Synthetic polynucleotide"
atggctgccgatggttatcttccagattggctcgaggacactctctctgaaggaataagacagtggtggaagctcaaacctggcccaccaccaccaaagcccgcagagcggcataaggacgacagcaggggtcttgtgcttcctgggtacaagtacctcggacccttcaacggactcgacaagggagagccggtcaacgaggcagacgccgcggccctcgagcacgacaaagcctacgaccggcagctcgacagcggagacaacccgtacctcaagtacaaccacgccgacgcggagtttcaggagcgccttaaagaagatacgtcttttgggggcaacctcggacgagcagtcttccgggcgaaaaagagggttcttgaacctctgggcctggttgaggaacctgttaagacggctccgggaaaaaagaggccggtagagcactctcctgtggagccagactcctcctcgggaaccggaaaggcgggccagcagcctgcaagaaaaagattgaattttggtcagactggagacgcagactcagtacctgacccccagcctctcggacagccaccagcagccccctctggtctgggaactaatacgatggctacaggcagtggcgcaccaatggcagacaataacgagggcgccgacggagtgggtaattcctcgggaaattggcattgcgattccacatggatgggcgacagagtcatcaccaccagcacccgaacctgggccctgcccacctacaacaaccacctctacaaacaaatttccagccaatcaggagcctcgaacgacaatcactactttggctacagcaccccttgggggtattttgacttcaacagattccactgccacttttcaccacgtgactggcaaagactcatcaacaacaactggggattccgacccaagagactcaacttcaagctctttaacattcaagtcaaagaggtcacgcagaatgacggtacgacgacgattgccaataaccttaccagcacggttcaggtgtttactgactcggagtaccagctcccgtacgtcctcggctcggcgcatcaaggatgcctcccgccgttcccagcagacgtcttcatggtgccacagtatggatacctcaccctgaacaacgggagtcaggcagtaggacgctcttcattttactgcctggagtactttccttctcagatgctgcgtaccggaaacaactttaccttcagctacacttttgaggacgttcctttccacagcagctacgctcacagccagagtctggaccgtctcatgaatcctctcatcgaccagtacctgtattacttgagcagaacaaacactccaagtggaaccaccacgcagtcaaggcttcagttttctcaggccggagcgagtgacattcgggaccagtctaggaactggcttcctggaccctgttaccgccagcagcgagtatcaaagacatctgcggataacaacaacagtgaatactcgtggactggagctaccaagtaccacctcaatggcagagactctctggtgaatccgggcccggccatggcaagccacaaggacgatgaagaaaagttttttcctcagagcggggttctcatctttgggaagcaaggctcagagaaaacaaatgtggacattgaaaaggtcatgattacagacgaagaggaaatcaggacaaccaatcccgtggctacggagcagtatggttctgtatctaccaacctccagagaggcaacagacaagcagctaccgcagatgtcaacacacaaggcgttcttccaggcatggtctggcaggacagagatgtgtaccttcaggggcccatctgggcaaagattccacacacggacggacattttcacccctctcccctcatgggtggattcggacttaaacaccctcctccacagattctcatcaagaacaccccggtacctgcgaatccttcgaccaccttcagtgcggcaaagtttgcttccttcatcacacagtactccacgggacaggtcagcgtggagatcgagtgggagctgcagaaggaaaacagcaaacgctggaatcccgaaattcagtacacttccaactacaacaagtctgttaatgtggactttactgtggacactaatggcgtgtattcagagcctcgccccattggcaccagatacctgactcgtaatctgtaa

SEQ ID NO: 12916 - DNA, 2208 bp, Artificial Sequence
  source: /note="Description of Artificial Sequence: Synthetic polynucleotide"
atggctgccgatggttatcttccagattggctcgaggacactctctctgaaggaataagacagtggtggaagctcaaacctggcccaccaccaccaaagcccgcagagcggcataaggacgacagcaggggtcttgtgcttcctgggtacaagtacctcggacccttcaacggactcgacaagggagagccggtcaacgaggcagacgccgcggccctcgagcacgacaaagcctacgaccggcagctcgacagcggagacaacccgtacctcaagtacaaccacgccgacgcggagtttcaggagcgccttaaagaagatacgtcttttgggggcaacctcggacgagcagtcttccaggcgaaaaagagggttcttgaacctctgggcctggttgaggaacctgttaagacggctccgggaaaaaagaggccggtagagcactctcctgtggagccagactcctcctcgggaaccggaaaggcgggccagcagcctgcaagaaaaagattgaattttggtcagactggagacgcagactcagtacctgacccccagcctctcggacagccaccagcagccccctctggtctgggaactaatacgatggctacaggcagtggcgcaccaatggcagacaataacgagggcgccgacggagtgggtaattcctcgggaaattggcattgcgattccacatggatgggcgacagagtcatcaccaccagcacccgaacctgggccctgcccacctacaacaaccacctctacaaacaaatttccagccaatcaggagcctcgaacgacaatcactactttggctacagcaccccttgggggtattttgacttcaacagattccactgccacttttcaccacgtgactggcaaagactcatcaacaacaactggggattccgacccaagagactcaacttcaagctctttaacattcaagtcaaagaggtcacgcagaatgacggtacgacgacgattgccaataaccttaccagcacggttcaggtgtttactgactcggagtaccagctcccgtacgtcctcggctcggcgcatcaaggatgcctcccgccgttcccagcagacgtcttcatggtgccacagtatggatacctcaccctgaacaacgggagtcaggcagtaggacgctcttcattttactgcctggagtactttccttctcagatgctgcgtaccggaaacaactttaccttcagctacacttttgaggacgttcctttccacagcagctacgctcacagccagagtctggaccgtctcatgaatcctctcatcgaccagtacctgtattacttgagcagaacaaacactccaagtggaaccaccacgcagtcaaggcttcagttttctcaggccggagcgagtgacattcgggaccagtctaggaactggcttcctggaccctgttaccgccagcagcgagtatcaaagacatctgcggataacaacaacagtgaatactcgtggactggagctaccaagtaccacctcaatggcagagactctctggtgaatccgggcccggccatggcaagccacaaggacgatgaagaaaagttttttcctcagagcggggttctcatctttgggaagcaaggctcagagaaaacaaatgtggacattgaaaaggtcatgattacagacgaagaggaaatcaggacaaccaatcccgtggctacggagcagtatggttctgtatctaccaacctccagagaggcaacagacaagcagctaccgcagatgtcaacacacaaggcgttcttccaggcacggtctggcaggacagagatgtgtaccttcaggggcccatctgggcaaagattccacacacggacggacattttcacccctctcccctcatgggtggattcggacttaaacaccctcctccacagattctcatcaagaacaccccggtacctgcgaatccttcgaccaccttcagtgcggcaaagtttgcttccttcatcacacagtactccacgggacaggccagcgtggagatcgagtgggagctgcagaaggaaaacagcaaacgctggaatcccgaaattcagtacacttccaactacaacaagtctgttaatgtggactttactgtggacactaatggcgtgtattcagagcctcgccccattggcaccagatacctgactcgtaatctgtaa

SEQ ID NO: 12917 - DNA, 2208 bp, Artificial Sequence
  source: /note="Description of Artificial Sequence: Synthetic polynucleotide"
atggctgccgatggttatcttccagattggctcgaggacactctctctgaaggaataagacagtggtggaagctcaaacctggcccaccaccgccaaagcccgcagagcggcacaaggacgccagtaggggtcttgtgcttcctgggtacaagtacctcggacccttcaacggactcgacaaaggagagccggtcaacgaggcagacgccgcggccctcgagcacgacaaggcctacgaccggcagctcgacagcggagacaacccgtacctcaagtacaaccacgccgacgcggagtttcaggagcgtcttaaagaagatacgtcttttgggggcaacctcggacgagcagtattccaggcgaaaaagagggttcttgaacctctgggcctggttgaggagcctgttaagacggctccgggaaaaaagaggccggtagagcactctcctgtggagccagactcctcctcgggaaccggaaaagcgggccagcagcctgcaagaaaaagattgaattttggtcagactggagacgcagactccgtacctgacccccagcctctcggacagccaccagcagcccccacaagtttgggatctactacaatggctacaggcagtggcgcaccaatggcagacaataacgagggtgccgatggagtgggtaattcctcaggaaattggcattgcgattcccaatggctgggcgacagagtcatcaccaccagcacccgaacctgggccctgcccacctacaacaaccacctctacaagcaaatctccagccaatcaggagcatcgaacgacaaccactactttggctacagcaccccttgggggtattttgacttcaacagattccactgtcacttctccccacgtgactggcaaagactcatcaacaacaactggggattccgacccaagagactcaacttcaagctctttaacattcaagtcaaagaggtcacgcagaatgacggtacgacgacgattgccaataaccttaccagcacggttcaggtgtttactgactcggagtaccagctcccgtacgtcctcggctcggcgcatcaaggatgcctcccgccgttcccagcagacgtcttcatggtcccacagtatggatacctcaccctgaacaacgggagtcaggcggtaggacgctcttccttttactgcctggagtactttccttctcagatgctgcgtaccggaaacaactttaccttcagctacacttttgaggacgttcctttccacagcagctacgctcacagccagagtctggaccgtctcatgaatcctctcatcgaccagtacctgtattacttgagcagaacaaacactccaagtggaaccaccacgcagtcaaggcttcagttttctcaggccggagcgagtgacattcgggaccagtctaggaactggcttcctggaccctgttaccgccagcagcgagtatcaaagacatctgcggataacaacaacagtgaatactcgtggactggagctaccaagtaccacctcaatggcagagactctctggtgaatccgggcccggccatggcaagccacaaggacgatgaagaaaagttttttcctcagagcggggttctcatctttgggaagcaaggctcagagaaaacaaatgtggacattgaaaaggtcatgattacagacgaagaggaaatcaggacaaccaatcccgtggctacggagcagtatggttctgtatctaccaacctccagagaggcaacagacaagcagctaccgcagatgtcaacacacaaggcgttcttccaggcatggtctggcaggacagagatgtgtaccttcaggggcccatctgggcaaagattccacacacggacggacattttcacccctctcccctcatgggtggattcggacttaaacaccctcctccacagattctcatcaagaacaccccggtacctgcgaatccttcgaccaccttcagtgcggcaaagtttgcttccttcatcacacagtactccacgggacaggtcagcgtggagatcgagtgggagctgcagaaggaaaacagcaaacgctggaatcccgaaattcagtacacttccaactacaacaagtctgttaatgtggactttactgtggacactaatggcgtgtattcagagcctcgccccattggcaccagatacctgactcgtaatctgtaa

SEQ ID NO: 12918 - DNA, 2208 bp, Artificial Sequence
  source: /note="Description of Artificial Sequence: Synthetic polynucleotide"
atggctgccgatggttatcttccagattggctcgaggacactctctctgaaggaataagacagtggtggaagctcaaacctggcccaccaccaccaaagcccgcagagcggcataaggacgacagcaggggtcttgtgcttcctgggtacaagtacctcggacccttcaacggactcgacaagggagagccggtcaacgaggcagacgccgcggccctcgagcacgacaaagcctacgaccggcagctcgacagcggagacaacccgtacctcaagtacaaccacgccgacgcggagtttcaggagcgccttaaagaagatacgtcttttgggggcaacctcggacgagcagtcttccaggcgaaaaagagggttcttgaacctctgggcctggttgaggaacctgttaagacggctccgggaaaaaagaggccggtagagcactctcctgtggagccagactcctcctcgggaaccggaaaggcgggccagcagcctgcaagaaaaagattgaattttggtcagactggagacgcagactcagtacctgacccccagcctctcggacagccaccagcagccccctctggtctgggaactaatacgatggctacaggcagtggcgcaccaatggcagacaataacgagggcgccgacggagtgggtaattcctcgggaaattggcattgcgattccacatggatgggcgacagagtcatcaccaccagcacccgaacctgggccctgcccacctacaacaaccacctctacaaacaaatttccagccaatcaggagccccgaacgacaatcactactttggctacagcaccccttgggggtattttgacttcaacagattccactgccacttttcaccacgtgactggcaaagactcatcaacaacaactggggattccgacccaagagactcaacttcaagctctttaacattcaagtcaaagaggtcacgcagaatgacggtacgacgacgattgccaataaccttaccagcacggttcaggtgtttactgactcggagtaccagctcccgtacgtcctcggctcggcgcatcaaggatgcctcccgccgttcccagcagacgtcttcatggtgccacagtatggatacctcaccctgaacaacgggagtcaggcagtaggacgctcttcattttactgcctggagtactttccttctcagatgctgcgtaccggaaacaactttaccttcagctacacttttgaggacgttcctttccacagcagctacgctcacagccagagtctggaccgtctcatgaatcctctcatcgaccagtacctgtattacttgagcagaacaaacactccaagtggaaccaccacgcagtcaaggcttcagttttctcaggccggagcgagtgacattcgggaccagtctaggaactggcttcctggaccctgttaccgccagcagcgagtatcaaagacatctgcggataacaacaacagtgaatactcgtggactggagctaccaagtaccacctcaatggcagagactctctggtgaatccgggcccggccatggcaagccacaaggacgatgaagaaaagttttttcctcagagcggggttctcatctttgggaagcaaggctcagagaaaacaaatgtggacattgaaaaggtcatgattacagacgaagaggaaatcaggacaaccaatcccgtggctacggagcagtatggttctgtatctaccaacctccagagaggcaacagacaagcagctaccgcagatgtcaacacacaaggcgttcttccaggcatggtctggcaggacagagatgtgtaccttcaggggcccatctgggcaaagattccacacacggacggacattttcacccctctcccctcatgggtggattcggacttaaacaccctcctccacagattctcatcaagaacaccccggtacctgcgaatccttcgaccaccttcagtgcggcaaagtttgcttccttcatcacacagtactccacgggacaggccagcgtggagatcgagtgggagctgcagaaggaaaacagcaaacgctggaatcccgaaattcagtacacttccaactacaacaagtctgttaatgtggactttactgtggacactaatggcgtgtattcagagcctcgccccattggcaccagatacctgactcgtaatctgtaa

SEQ ID NO: 12919 - DNA, 2208 bp, Artificial Sequence
  source: /note="Description of Artificial Sequence: Synthetic polynucleotide"
atggctgccgatggttatcttccagattggctcgaggacactctctctgaaggaataagacagtggtggaagctcaaacctggcccaccaccaccaaagcccgcagagcggcataaggacgacagcaggggtcttgtgcttcctgggtacaagtacctcggacccttcaacggactcgacaaaggagagccggtcaacgaggcagacgccgcggccctcgagcacgacaaggcctacgaccggcagctcgacagcggagacaacccgtacctcaagtacaaccacgccgacgcggagtttcaggagcgtcttaaagaagatacgtcttttgggggcaacctcggacgagcagtattccaggcgaaaaagagggttcttgaacctctgggcctggttgaggagcctgttaagacggctccgggaaaaaagaggccggtagagcactctcctgtggagccagactcctcctcgggaaccggaaaagcgggccagcagcctgcaagaaaaagattgaattttggtcagactggagacgcagactccgtacctgacccccagcctctcggacagccaccagcagcccccacaagtttgggatctactacaatggctacaggcagtggcgcaccaatggcagacaataacgagggtgccgatggagtgggtaattcctcaggaaattggcattgcgattcccaatggctgggcgacagagtcatcaccaccagcacccgaacctgggccctgcccacctacaacaaccacctctacaaacaaatttccagccaatcaggagcctcgaacgacaatcactactttggctacagcaccccttgggggtattttgacttcaacagattccactgccacttttcaccacgtgactggcaaagactcatcaacaacaactggggattccgacccaagagactcaacttcaagctctttaacattcaagtcaaagaggtcacgcagaatgacggtacgacgacgattgccaataaccttaccagcacggttcaggtgtttactgactcggagtaccagctcccgtacgtcctcggctcggcgcatcaaggatgcctcccgccgttcccagcagacgtcttcatggtgccacagtatggatacctcaccctgaacaacgggagtcaggcagtaggacgctcttcattttactgcctggagtactttccttctcagatgctgcgtaccggaaacaactttaccttcagctacacttttgaggacgttcctttccacagcagctacgctcacagccagagtctggaccgtctcatgaatcctctcatcgaccagtacctgtattacttgagcagaacaaacactccaagtggaaccaccacgcagtcaaggcttcagttttctcaggccggagcgagtgacattcgggaccagtctaggaactggcttcctggaccctgttaccgccagcagcgagtatcaaagacatctgcggataacaacaacagtgaatactcgtggactggagctaccaagtaccacctcaatggcagagactctctggtgaatccgggcccggccatggcaagccacaaggacgatgaagaaaagttttttcctcagagcggggttctcatctttgggaagcaaggctcagagaaaacaaatgtggacattgaaaaggtcatgattacagacgaagaggaaatcaggacaaccaatcccgtggctacggagcagtatggttctgtatctaccaacctccagagaggcaacagacaagcagctaccgcagatgtcaacacacaaggcgttcttccaggcatggtctggcaggacagagatgtgtaccttcaggggcccatctgggcaaagattccacacacggacggacattttcacccctctcccctcatgggtggattcggacttaaacaccctcctccacagattctcatcaagaacaccccggtacctgcgaatccttcgaccaccttcagtgcggcaaagtttgcttccttcatcacacagtactccacgggacaggtcagcgtggagatcgagtgggagctgcagaaggaaaacagcaaacgctggaatcccgaaattcagtacacttccaactacaacaagtctgttaatgtggactttactgtggacactaatggcgtgtattcagagcctcgccccattggcaccagatacctgactcgtaatctgtaa

SEQ ID NO: 12920 - DNA, 2208 bp, Artificial Sequence
  source: /note="Description of Artificial Sequence: Synthetic polynucleotide"
atggctgccgatggttatcttccagattggctcgaggacattctctctgaaggaataagacagtggtggaagctcaaacctggcccaccaccgccaaagcccgcagagcggcacaaggacgccagtaggggtcttgtgcttcctgggtacaagtacctcggacccttcaacggactcgacaaaggagagccggtcaacgaggcagacgccgcggccctcgagcacgacaaggcctacgaccggcagctcgacagcggagacaacccgtacctcaagtacaaccacgccgacgcggagtttcaggagcgtcttaaagaagatacgtcttttgggggcaacctcggacgagcagtattccaggcgaaaaagagggttcttgaacctctgggcctggttgaggagcctgttaagacggctccgggaaaaaagaggccggtagagcactctcctgtggagccagactcctcctcgggaaccggaaaagcgggccagcagcctgcaagaaaaagattgaattttggtcagactggagacgcagactccgtacctgacccccagcctctcggacagccaccagcagcccccacaagtttgggatctactacaatggctacaggcagtggcgcaccaatggcagacaataacgagggtgccgatggagtgggtaattcctcaggaaattggcattgcgattcccaatggctgggcgacagagtcatcaccaccagcacccgaacctgggccctgcccacctacaacaaccacctctacaagcaaatctccagccaatcaggagcatcgaacgacaaccactactttggctacagcaccccttgggggtattttgacttcaacagattccactgtcacttctccccacgtgactggcaaagactcatcaacaacaactggggattccgacccaagagactcaacttcaagctctttaacattcaagtcaaagaggtcacgcagaatgacggtacgacgacgattgccaataaccttaccagcacggttcaggtgtttactgactcggagtaccagctcccgtacgtcctcggctcggcgcatcaaggatgcctcccgccgttcccagcagacgtcttcatggtgccacagtatggatacctcaccctgaacaacgggagtcaggcagtaggacgctcttcattttactgcctggagtactttccttctcagatgctgcgtaccggaaacaactttaccttcagctacacttttgaggacgttcctttccacagcagctacgctcacagccagagtctggaccgtctcatgaatcctctcatcgaccagtacctgtattacttgagcagaacaaacactccaagtggaaccaccacgcagtcaaggcttcagttttctcaggccggagcgagtgacattcgggaccagtctaggaactggcttcctggaccctgttaccgccagcagcgagtatcaaagacatctgcggataacaacaacagtgaatactcgtggactggagctaccaagtaccacctcaatggcagagactctctggtgaatccgggcccggccatggcaagccacaaggacgatgaagaaaagttttttcctcagagcggggttctcatctttgggaagcaaggctcagagaaaacaaatgtggacattgaaaaggtcatgattacagacgaagaggaaatcaggacaaccaatcccgtggctacggagcagtatggttctgtatctaccaacctccagagaggcaacagacaagcagctaccgcagatgtcaacacacaaggcgttcttccaggcatggtctggcaggacagagatgtgtaccttcaggggcccatctgggcaaagattccacacacggacggacattttcacccctctcccctcatgggtggattcggacttaaacaccctcctccacagattctcatcaagaacaccccggtacctgcgaatccttcgaccaccttcagtgcggcaaagtttgcttccttcatcacacagtactccacgggacaggtcagcgtggagatcgagtgggagctgcagaaggaaaacagcaaacgctggaatcccgaaattcagtacacttccaactacaacaagtctgttaatgtggactttactgtggacactaatggcgtgtattcagagcctcgccccattggcaccagatacctgactcgtaatctgtaa

SEQ ID NO: 12921 - DNA, 2208 bp, Artificial Sequence
  source: /note="Description of Artificial Sequence: Synthetic polynucleotide"
atggctgccgatggttatcttccagattggctcgaggacactctctctgaaggaataagacagtggtggaagctcaaacctggcccaccaccgccaaagcccgcagagcggcacaaggacgccagtaggggtcttgtgcttcctgggtacaagtacctcggacccttcaacggactcgacaaaggagagccggtcaacgaggcagacgccgcggccctcgagcacgacaaggcctacgaccggcagctcgacagcggagacaacccgtacctcaagtacaaccacgccgacgcggagtttcaggagcgtcttaaagaagatacgtcttttgggggcaacctcggacgagcagtattccaggcgaaaaagagggttcttgaacctctgggcctggttgaggagcctgttaagacggctccgggaaaaaagaggccggtagagcactctcctgtggagccagactcctcctcgggaaccggaaaagcgggccagcagcctgcaagaaaaagattgaattttggtcagactggagacgcagactcagtacctgacccccagcctctcggacagccaccagcagccccctctggtctgggaactaatacgatggctacaggcagtggcgcaccaatggcagacaataacgagggcgccgacggagtgggtaattcctcgggaaattggcattgcgattccacatggatgggcgacagagtcatcaccaccagcacccgaacctgggccctgcccacctacaacaaccacctctacaaacaaatttccagccaatcaggagcctcgaacgacaatcactactttggctacagcaccccttgggggtattttgacttcaacagattccactgccacttttcaccacgtgactggcaaagactcatcaacaacaactggggattccgacccaagagactcaacttcaagctctttaacattcaagtcaaagaggtcacgcagaatgacggtacgacgacgattgccaataaccttaccagcacggttcaggtgtttactgactcggagtaccagctcccgtacgtcctcggctcggcgcatcaaggatgcctcccgccgttcccagcagacgtcttcatggtgccacagtatggatacctcaccctgaacaacgggagtcaggcagtaggacgctcttcattttactgcctggagtactttccttctcagatgctgcgtaccggaaacaactttaccttcagctacacttttgaggacgttcctttccacagcagctacgctcacagccagagtctggaccgtctcatgaatcctctcatcgaccagtacctgtattacttgagcagaacaaacactccaagtggaaccaccacgcagtcaaggcttcagttttctcaggccggagcgagtgacattcgggaccagtctaggaactggcttcctggaccctgttaccgccagcagcgagtatcaaagacatctgcggataacaacaacagtgaatactcgtggactggagctaccaagtaccacctcaatggcagagactctctggtgaatccgggcccggccatggcaagccacaaggacgatgaagaaaagttttttcctcagagcggggttctcatctttgggaagcaaggctcagagaaaacaaatgtggacattgaaaaggtcatgattacagacgaagaggaaatcaggacaaccaatcccgtggctacggagcagtatggttctgtatctaccaacctccagagaggcaacagacaagcagctaccgcagatgtcaacacacaaggcgttcttccaggcatggtctggcaggacagagatgtgtaccttcaggggcccatctgggcaaagattccacacacggacggacattttcacccctctcccctcatgggtggattcggacttaaacaccctcctccacagattctcatcaagaacaccccggtacctgcgaatccttcgaccaccttcagtgcggcaaagtttgcttccttcatcacacagtactccacgggacaggccagcgtggagatcgagtgggagctgcagaaggaaaacagcaaacgctggaatcccgaaattcagtacacttccaactacaacaagtctgttaatgtggactttactgtggacactaatggcgtgtattcagagcctcgccccattggcaccagatacctgactcgtaatctgtaa

SEQ ID NO: 12922 - DNA, 2208 bp, Artificial Sequence
  source: /note="Description of Artificial Sequence: Synthetic polynucleotide"
atggctgccgatggttatcttccagattggctcgaggacactctctctgaaggaataagacagtggtggaagctcaaacctggcccaccaccaccaaagcccgcagagcggcataaggacgacagcaggggtcttgtgcttcctgggtacaagtacctcggacccttcaacggactcgacaagggagagccggtcaacgaggcagacgccgcggccctcgagcacgacaaagcctacgaccggcagctcgacagcggagacaacccgtacctcaagtacaaccacgccgacgcggagtttcaggagcgccttaaagaagatacgtcttttgggggcaacctcggacgagcagtattccaggcgaaaaagagggttcttgaacctctgggcctggttgaggagcctgttaagacggctccgggaaaaaagaggccggtagagcactctcctgtggagccagactcctcctcgggaaccggaaaagcgggccagcagcctgcaagaaaaagattgaattttggtcagactggagacgcagactccgtacctgacccccagcctctcggacagccaccagcagcccccacaagtttgggatctactacaatggctacaggcagtggcgcaccaatggcagacaataacgagggtgccgatggagtgggtaattcctcrggaaattggcattgcgattccacatggatgggcgacagagtcatcaccaccagcacccgaacctgggccctgcccacctacaacaaccacctctacaaacaaatttccagccaatcaggagcctcgaacgacaatcactactttggctacagcaccccttgggggtattttgacttcaacagattccactgccacttttcaccacgtgactggcaaagactcatcaacaacaactggggattccgacccaagagactcaacttcaagctctttaacattcaagtcaaagaggtcacgcagaatgacggtacgacgacgattgccaataaccttaccagcacggttcaggtgtttactgactcggagtaccagctcccgtacgtcctcggctcggcgcatcaaggatgcctcccgccgttcccagcagacgtcttcatggtgccacagtatggatacctcaccctgaacaacgggagtcaggcagtaggacgctcttcattttactgcctggagtactttccttctcagatgctgcgtaccggaaacaactttaccttcagctacacttttgaggacgttcctttccacagcagctacgctcacagccagagtctggaccgtctcatgaatcctctcatcgaccagtacctgtattacttgagcagaacaaacactccaagtggaaccaccacgcagtcaaggcttcagttttctcaggccggagcgagtgacattcgggaccagtctaggaactggcttcctggaccctgttaccgccagcagcgagtatcaaagacatctgcggataacaacaacagtgaatactcgtggactggagctaccaagtaccacctcaatggcagagactctctggtgaatccgggcccggccatggcaagccacaaggacgatgaagaaaagttttttcctcagagcggggttctcatctttgggaagcaaggctcagagaaaacaaatgtggacattgaaaaggtcatgattacagacgaagaggaaatcaggacaaccaatcccgtggctacggagcagtatggttctgtatctaccaacctccagagaggcaacagacaagcagctaccgcagatgtcaacacacaaggcgttcttccaggcatggtctggcaggacagagatgtgtaccttcaggggcccatctgggcaaagattccacacacggacggacattttcacccctctcccctcatgggtggattcggacttaaacaccctcctccacagattctcatcaagaacaccccggtacctgcgaatccttcgaccaccttcagtgcggcaaagtttgcttccttcatcacacagtactccacgggacaggccagcgtggagatcgagtgggagctgcagaaggaaaacagcaaacgctggaatcccgaaattcagtacacttccaactacaacaagtctgttaatgtggactttactgtggacactaatggcgtgtattcagagcctcgccccattggcaccagatacctgactcgtaatctgtaa

SEQ ID NO: 12923 - DNA, 2208 bp, Artificial Sequence
  source: /note="Description of Artificial Sequence: Synthetic polynucleotide"
atggctgccgatggttatcttccagattggctcgaggacactctctctgaaggaataagacagtggtggaagctcaaacctggcccaccaccgccaaagcccgcagagcggcacaaggacgccagtaggggtcttgtgcttcctgggtacaagtacctcggacccttcaacggactcgacaaaggagagccggtcaacgaggcagacgccgcggccctcgagcacgacaaggcctacgaccggcagctcgacagcggagacaacccgtacctcaagtacaaccacgccgacgcggagtttcaggagcgtcttaaagaagatacgtcttttgggggcaacctcggacgagcagtattccaggcgaaaaagagggttcttgaacctctgggcctggttgaggaacctgttaagacggctccgggaaaaaagaggccggtagagcactctcctgtggagccagactcctcctcgggaaccggaaaggcgggccagcagcctgcaagaaaaagattgaattttggtcagactggagacgcagactcagtacctgacccccagcctctcggacagccaccagcagccccctctggtctgggaactaatacgatggctacaggcagtggcgcaccaatggcagacaataacgagggcgccgacggagtgggtaattcctcgggaaattggcattgcgattccacatggatgggcgacagagtcatcaccaccagcacccgaacctgggccctgcccacctacaacaaccacctctacaaacaaatttccagccaatcaggagcctcgaacgacaatcactactttggctacagcaccccttgggggtattttgacttcaacagattccactgccacttttcaccacgtgactggcaaagactcatcaacaacaactggggattccgacccaagagactcaacttcaagctctttaacattcaagtcaaagaggtcacgcagaatgacggtacgacgacgattgccaataaccttaccagcacggttcaggtgtttactgactcggagtaccagctcccgtacgtcctcggctcggcgcatcaaggatgcctcccgccgttcccagcagacgtcttcatggtgccacagtatggatacctcaccctgaacaacgggagtcaggcagtaggacgctcttcattttactgcctggagtactttccttctcagatgctgcgtaccggaaacaactttaccttcagctacacttttgaggacgttcctttccacagcagctacgctcacagccagagtctggaccgtctcatgaatcctctcatcgaccagtacctgtattacttgagcagaacaaacactccaagtggaaccaccacgcagtcaaggcttcagttttctcaggccggagcgagtgacattcgggaccagtctaggaactggcttcctggaccctgttaccgccagcagcgagtatcaaagacatctgcggataacaacaacagtgaatactcgtggactggagctaccaagtaccacctcaatggcagagactctctggtgaatccgggcccggccatggcaagccacaaggacgatgaagaaaagttttttcctcagagcggggttctcatctttgggaagcaaggctcagagaaaacaaatgtggacattgaaaaggtcatgattacagacgaagaggaaatcaggacaaccaatcccgtggctacggagcagtatggttctgtatctaccaacctccagagaggcaacaggcaagcagctaccgcagatgtcaacacacaaggcgttcttccaggcatggtctggcaggacagagatgtgtaccttcaggggcccatctgggcaaagattccacacacggacggacattttcacccctctcccctcatgggtggattcggacttaaacaccctcctccacagattctcatcaagaacaccccggtacctgcgaatccttcgaccaccttcagtgcggcaaagtttgcttccttcatcacacagtactccacgggacaggtcagcgtggagatcgagtgggagctgcagaaggaaaacagcaaacgctggaatcccgaaattcagtacacttccaactacaacaagtctgttaatgtggactttactgtggacactaatggcgtgtattcagagcctcgccccattggcaccagatacctgactcgtaatctgtaa

SEQ ID NO: 12924 - DNA, 2208 bp, Artificial Sequence
  source: /note="Description of Artificial Sequence: Synthetic polynucleotide"
atggctgccgatggttatcttccagattggctcgaggacactctctctgaaggaataagacagtggtggaagctcaaacctggcccaccaccgccaaagcccgcagagcggcacaaggacgccagtaggggtcttgtgcttcctgggtacaagtacctcggacccttcaacggactcgacaaaggagagccggtcaacgaggcagacgccgcggccctcgagcacgacaaggcctacgaccggcagctcgacagcggagacaacccgtacctcaagtacaaccacgccgacgcggagtttcaggagcgtcttaaagaagatacgccttttgggggcaacctcggacgagcagtattccaggcgaaaaagagggttcttgaacctctgggcctggttgaggagcctgttaagacggctccgggaaaaaagaggccggtagagcactctcctgtggagccagactcctcctcgggaaccggaaaagcgggccagcggcctgcaagaaaaagattgaattttggtcagactggagacgcagactccgtacctgacccccagcctctcggacagccaccagcagcccccacaagtttgggatctactacaatggctacaggcagtggcgcaccaatggcagacaataacgagggtgccgatggagtgggtaattcctcaggaaattggcattgcgattcccaatggctgggcgacagagtcatcaccaccagcacccgaacctgggccctgcccacctacaacaaccacctctacaagcaaatccccagccaatcaggagcatcgaacgacaaccactactttggctacagcaccccttgggggtattttgacttcaacagattccactgtcacttctccccacgtgactggcaaagactcatcaacaacaactggggattccgacccaagagactcaacttcaagctctttaacattcaagtcaaagaggtcacgcagaatgacggtacgacgacgattgccaataaccttaccagcacggttcaggtgtttactgactcggagtaccagctcccgtacgtcctcggctcggcgcatcaaggatgcctcccgccgttcccagcagacgtcttcatggtgccacagtatggatacctcaccctgaacaacgggagtcaggcagtaggacgctcttcattttactgcctggagtactttccttctcagatgctgcgtaccggaaacaactttaccttcagctacacttttgaggacgttcctttccacagcagctacgctcacagccagagtctggaccgtctcatgaatcctctcatcgaccagtacctgtattacttgagcagaacaaacactccaagtggaaccaccacgcagtcaaggcttcagttttctcaggccggagcgagtgacattcgggaccagtctaggaactggcttcctggaccctgttaccgccagcagcgagtatcaaagacatctgcggataacaacaacagtgaatactcgtggactggagctaccaagtaccacctcaatggcagagactctctggtgaatccgggcccggccatggcaagccacaaggacgatgaagaaaagttttttcctcagagcggggttctcatctttgggaagcaaggctcagagaaaacaaatgtggacattgaaaaggtcatgattacagacgaagaggaaatcaggacaaccaatcccgtggctacggagcagtatggttctgtatctaccaacctccagagaggcaacagacaagcagctaccgcagatgtcaacacacaaggcgttcttccaggcatggtctggcaggacagagatgtgtaccttcaggggcccatctgggcaaagattccacacacggacggacattttcacccctctcccctcatgggtggattcggacttaaacaccctcctccacagattctcatcaagaacaccccggtacctgcgaatccttcgaccaccttcagtgcggcaaagtttgcttccttcatcacacagtactccacgggacaggccagcgtggagatcgagtgggagctgcagaaggaaaacagcaaacgctggaatcccgaaattcagtacacttccaactacaacaagtctgttaatgtggactttactgtggacactaatggcgtgtattcagagcctcgccccattggcaccagatacctgactcgtaatctgtaa

SEQ ID NO: 12925 - DNA, 2208 bp, Artificial Sequence
  source: /note="Description of Artificial Sequence: Synthetic polynucleotide"
atggctgccgatggttatcttccagattggctcgaggacactctctctgaaggaataagacagtggtggaagctcaaacctggcccaccaccgccaaagcccgcagagcggcacaaggacgacagtaggggtcttgtgcttcctgggtacaagtacctcggacccttcaacggactcgacaaaggagagccggtcaacgaggcagacgccgcggccctcgagcacgacaaggcctacgaccggcagctcgacagcggagacaacccgtacctcaagtacaaccacgccgacgcggagtttcaggagcgtcttaaagaagatacgtcttttgggggcaacctcggacgagcagtattccaggcgaaaaagagggttcttgaacctctgggcctggttgaggagcctgttaagacggctccgggaaaaaagaggccggtagagcactctcctgtggagccagactcctcctcgggaaccggaaaagcgggccagcagcctgcaagaaaaagattgaattttggtcagactggagacgcagactccgtacctgacccccagcctctcggacagccaccagcagcccccacaagtttgggatctactacaatggctacaggcagtggcgcaccaatggcagacaataacgagggtgccgatggagtgggtaattcctcaggaaattggcattgcgattccacatggatgggcgacagagtcatcaccaccagcacccgaacctgggccctgcccacctacaacaaccacctctacaaacaaatttccagccaatcaggagcctcgaacgacaatcactactttggctacagcaccccttgggggtattttgacttcaacagattccactgccacttttcaccacgtgactggcaaagactcatcaacaacaactggggattccgacccaagagactcaacttcaagctctttaacattcaagtcaaagaggtcacgcagaatgacggtacgacgacgattgccaataaccttaccagcacggttcaggtgtttactgactcggagtaccagctcccgtacgtcctcggctcggcgcatcaaggatgcctcccgccgttcccagcagacgtcttcatggtgccacagtatggatacctcaccctgaacaacgggagtcaggcagtaggacgctcttcattttactgcctggagtactttccttctcagatgctgcgtaccggaaacaactttaccttcagctacacttttgaggacgttcctttccacagcagctacgctcacagccagagtctggaccgtctcatgaatcctctcaccgaccagtacctgtattacttgagcagaacaaacactccaagtggaaccaccacgcagtcaaggcttcagttttctcaggccggagcgagtgacattcgggaccagtctaggaactggcttcctggaccctgttaccgccagcagcgagtatcaaagacatctgcggataacaacaacagtgaatactcgtggactggagctaccaagtaccacctcaatggcagagactctctggtgaatccgggcccggccatggcaagccacaaggacgatgaagaaaagttttttcctcagagcggggttctcatctttgggaagcaaggctcagagaaaacaaatgtggacattgaaaaggtcatgattacagacgaagaggaaatcaggacaaccaatcccgtggctacggagcagtatggttctgtatctaccaacctccagagaggcaacagacaagcagctaccgcagatgtcaacacacaaggcgttcttccaggcatggtctggcaggacagagatgtgtaccttcaggggcccatctgggcaaagattccacacacggacggacattttcacccctctcccctcatgggtggattcggacttaaacaccctcctccacagattctcatcaagaacaccccggtacctgcgaatccttcgaccaccttcagtgcggcaaagtttgcttccttcatcacacagtactccacgggacaggtcagcgtggagatcgagtgggagctgcagaaggaaaacagcaaacgctggaatcccgaaattcagtacacttccaactacaacaagtctgttaatgtggactttactgtggacactaatggcgtgtattcagagcctcgccccattggcaccagatacctgactcgtaatctgtaa

SEQ ID NO: 12926 - DNA, 2208 bp, Artificial Sequence
  source: /note="Description of Artificial Sequence: Synthetic polynucleotide"
atggctgccgatggttatcttccagattggctcgaggacactctctctgaaggaataagacagtggtggaagctcaaacctggcccaccaccaccaaagcccgcagagcggcataaggacgacagcaggggtcttgtgcttcctgggtacaagtacctcggacccttcaacggactcgacaagggagagccggtcaacgaggcagacgccgcggccctcgagcacgacaaagcctacgaccggcagctcgacagcggagacaacccgtacctcaagtacaaccacgccgacgcggagtttcaggagcgccttaaagaagatacgtcttttgggggcaacctcggacgagcagtcttccaggcgaaaaagagggttcttgaacctctgggcctggttgaggaacctgttaagacggctccgggaaaaaagaggccggtagagcactctcctgtggagccagactcctcctcgggaaccggaaaggcgggccagcagcctgcaagaaaaagattgaattttggtcagactggagacgcagactcagtacctgacccccagcctctcggacagccaccagcagccccctctggtctgggaactaatacgatggctacaggcagtggcgcaccaatggcagacaataacgagggcgccgacggagtgggtaattcctcgggaaattggcattgcgattccacatggatgggcgacagagtcatcaccaccagcacccgaacctgggccctgcccacctacaacaaccacctctacaaacaaatttccagccaatcaggagcctcgaacgacaatcactactttggctacagcaccccttgggggtattttgacttcaacagattccactgccacttttcaccacgtgactggcaaagactcatcaacaacaactggggattccgacccaagagactcaacttcaagctctttaacattcaagtcaaagaggtcacgcagaatgacggtacgacgacgattgccaataaccttaccagcacggttcaggtgtttactgactcggagtaccagctcccgtacgtcctcggctcggcgcatcaaggatgcctcccgccgttcccagcagacgtcttcatggtgccacagtatggatacctcaccctgaacaacgggagtcaggcagtaggacgctcttcattttactgcctggagtactttccttctcagatgctgcgtaccggaaacaactttaccttcagctacacttttgaggacgttcctttccacagcagctacgctcacagccagagtctggaccgtctcatgaatcctctcatcgaccagtacctgtattacttgagcagaacaaacactccaagtggaaccaccgcgcagtcaaggcttcagttttctcaggccggagcgagtgacattcgggaccagtctaggaactggcttcctggaccctgttaccgccagcagcgagtatcaaagacatctgcggataacaacaacagtgaatactcgtggactggagctaccaagtaccacctcaatggcagagactctctggtgaatccgggcccggccatggcaagccacaaggacgatgaagaaaagttttttcctcagagcggggttctcatctttgggaagcaaggctcagagaaaacaaatgtggacattgaaaaggtcatgattacagacgaagaggaaatcaggacaaccaatcccgtggctacggagcagtatggttctgtatctaccaacctccagagaggcaacagacaagcagctaccgcagatgtcaacacacaaggcgttcttccaggcatggtctggcaggacagagatgtgtaccttcaggggcccatctgggcaaagattccacacacggacggacattttcacccctctcccctcatgggtggattcggacttaaacaccctcctccacagattctcatcaagaacaccccggtacctgcgaatccttcgaccaccttcagtgcggcaaagtttgcttccttcatcacacagtactccacgggacaggtcagcgtggagatcgagtgggagctgcagaaggaaaacagcaaacgctggaatcccgaaattcagtacacttccaactacaacaagtctgttaatgtggactttactgtggacactaatggcgtgtattcagagcctcgccccattggcaccagatacctgactcgtaatctgtaa

SEQ ID NO: 12927 - DNA, 2208 bp, Artificial Sequence
  source: /note="Description of Artificial Sequence: Synthetic polynucleotide"
atggctgccgatggttatcttccagattggctcgaggacactctctctgaaggaataagacagtggtggaagctcaaacctggcccaccaccaccaaagcccgcagagcggcataaggacgacagcaggggtcttgtgcttcctgggtacaagtacctcggacccttcaacggactcgacaagggagagccggtcaacgaggcagacgccgcggccctcgagcacgacaaagcctacgaccggcagctcgacagcggagacaacccgtacctcaagtacaaccacgccgacgcggagtttcaggagcgccttaaagaagatacgtcttttgggggcaacctcggacgagcagtcttccaggcgaaaaagagggttcttgaacctctgggcctggttgaggaacctgttaagacggctccgggaaaaaagaggccggtagagcactctcctgtggagccagactcctcctcgggaaccggaaaggcgggccagcagcctgcaagaaaaagattgaattttggtcagactggagacgcagactcagtacctgacccccagcctctcggacagccaccagcagccccctctggtctgggaactaatacgatggctacaggcagtggcgcaccaatggcagacaataacgagggcgccgacggagtgggtaattcctcgggaaattggcattgcgattccacatggatgggcgacagagtcatcaccaccagcacccgaacctgggccctgcccacctacaacaaccacctctacaaacaaatttccagccaatcaggagcctcgaacggcaatcactactttggctacagcaccccttgggggtattttgacttcaacagattccactgccacttttcaccacgtgactggcaaagactcatcaacaacaactggggattccgacccaagagactcaacttcaagctctttaacattcaagtcaaagaggtcacgcagaatgacggtacgacgacgattgccaataaccttaccagcacggttcaggtgtttactgactcggagtaccagctcccgtacgtcctcggctcggcgcatcaaggatgcctcccgccgttcccagcagacgtcttcatggtgccacagtatggatacctcaccctgaacaacgggagtcaggcagtaggacgctcttcattttactgcctggagtactttccttctcagatgctgcgtaccggaaacaactttaccttcagctacacttttgaggacgttcctttccacagcagctacgctcacagccagagtctggaccgtctcatgaatcctctcatcgaccagtacctgtattacttgagcagaacaaacactccaagtggaaccaccacgcagtcaaggcttcagttttctcaggccggagcgagtgacattcgggaccagtctaggaactggcttcctggaccctgttaccgccagcagcgagtatcaaagacatctgcggataacaacaacagtgaatactcgtggactggagctaccaagtaccacctcaatggcagagactctctggtgaatccgggcccggccatggcaagccacaaggacgatgaagaaaagttttttcctcagagcggggttctcatctttgggaagcaaggctcagagaaaacaaatgtggacattgaaaaggtcatgattacagacgaagaggaaatcaggacaaccaatcccgtggctacggagcagtatggttctgtatctaccaacctccagagaggcaacagacaagcagctaccgcagatgtcaacacacaaggcgttcttccaggcatggtctggcaggacagagatgtgtaccttcaggggcccatctgggcaaagattccacacacggacggacattttcacccctctcccctcatgggtggattcggacttaaacaccctcctccacagattctcatcaagaacaccccggtacctgcgaatccttcgaccaccttcagtgcggcaaagtttgcttccttcatcacacagtactccacgggacaggtcagcgtggagatcgagtgggagctgcagaaggaaaacagcaaacgctggaatcccgaaattcagtacacttccaactacaacaagtctgttaatgtggactttactgtggacactaatggcgtgtattcagagcctcgccccattggcaccagatacctgactcgtaatctgtaa

SEQ ID NO: 12928 - DNA, 2208 bp, Artificial Sequence
  source: /note="Description of Artificial Sequence: Synthetic polynucleotide"
atggctgccgatggttatcttccagattggctcgaggacactctctctgaaggaataagacagtggtggaagctcaaacctggcccaccaccaccaaagcccgcagagcggcataaggacgacagcaggggtcttgtgcttcctgggtacaagtacctcggacccttcaacggactcgacaagggagagccggtcaacgaggcagacgccgcggccctcgagcacgacaaagcctacgaccggcagctcgacagcggagacaacccgtacctcaagtacaaccacgccgacgcggagtttcaggagcgccttaaagaagatacgtcttttgggggcaacctcggacgagcagtcttccaggcgaaaaagagggttcttgaacctctgggcctggttgaggaacctgttaagacggctccgggaaaaaagaggccggtagagcactctcctgtggagccagactcctcctcgggaaccggaaaggcgggccagcagcctgcaagaaaaagattgaattttggtcagactggagacgcagactcagtacctgacccccagcctctcggacagccaccagcagccccctctggtctgggaactaatacgatggctacaggcagtggcgcaccaatggcagacaataacgagggcgccgacggagtgggtaattcctcgggaaattggcattgcgattccacatggatgggcgacagagtcatcaccaccagcacccgaacctgggccctgcccacctacaacaaccacctctacaaacaaatttccagccaatcaggagcctcgaacgacaatcactactttggctacagcaccccttgggggtattttgacttcaacagattccactgccacttttcaccacgtgactggcaaagactcatcaacaacaactggggattccgacccaagagactcaacttcaagctctttaacattcaagtcaaagaggtcacgcagaatgacggtacgacgacgattgccaataaccttaccagcacggttcaggtgtttactgactcggagtaccagctcccgtacgtcctcggctcggcgcatcaaggatgcctcccgccgttcccagcagacgtcttcatggtgccacagtatggatacctcaccctgaacaacgggagtcaggcagtaggacgctcttcattttactgcctggagtactttccttctcagatgctgcgtaccggaaacaactttaccttcagctacacttttgaggacgttcctttccacagcagctacgctcacagccagagtctggaccgtctcatgaatcctctcatcgaccagtacctgtattacttgagcagaacaaacactccaagtggaaccaccacgcagtcaaggcttcagttttctcaggccggagcgagtgacattcgggaccagtctaggaactggcttcctggaccctgttaccgccagcagcgagtatcaaagacatctgcggataacaacaacagtgaatactcgtggactggagctaccaagtaccacctcaatggcagagactctctggtgaatccgggcccggccatggcaagccacaaggacgatgaagaaaagttttttcctcagagcggggttctcatctttgggaagcaaggctcagagaaaacaaatgtggacattgaaagggtcatgattacagacgaagaggaaatcaggacaaccaatcccgtggctacggagcagtatggttctgtatctaccaacctccagagaggcaacagacaagcagctaccgcagatgtcaacacacaaggcgttcttccaggcatggtctggcaggacagagatgtgtaccttcaggggcccatctgggcaaagattccacacacggacggacattttcacccctctcccctcatgggtggattcggacttaaacaccctcctccacagattctcatcaagaacaccccggtacctgcgaatccttcgaccaccttcagtgcggcaaagtttgcttccttcatcacacagtactccacgggacaggtcagcgtggagatcgagtgggagctgcagaaggaaaacagcaaacgctggaatcccgaaattcagtacacttccaactacaacaagtctgttaatgtggactttactgtggacactaatggcgtgtattcagagcctcgccccattggcaccagatacctgactcgtaatctgtaa

SEQ ID NO: 12929 - DNA, 2208 bp, Artificial Sequence
  source: /note="Description of Artificial Sequence: Synthetic polynucleotide"
atggctgccgatggttatcttccagattggctcgaggacactctctctgaaggaataagacagtggtggaagctcaaacctggcccaccaccaccaaagcccgcagagcggcataaggacgacagcaggggtcttgtgcttcctgggtacaagtacctcggacccttcaacggactcgacaagggagagccggtcaacgaggcagacgccgcggccctcgagcacgacaaagcctacgaccggcagctcgacagcggagacaacccgtacctcaagtacaaccacgccgacgcggagtttcaggagcgccttaaagaagatacgtcttttgggggcaacctcggacgagcagtcttccaggcgaaaaagagggttcttgaacctctgggcctggttgaggaacctgttaagacggctccgggaaaaaagaggccggtagagcactctcctgtggagccagactcctcctcgggaaccggaaaggcgggccagcagcctgcaagaaaaagattgaattttggtcagactggagacgcagactcagtacctgacccccagcctctcggacagccaccagcagccccctctggtctgggaactaatacgatggctacaggcagtggcgcaccaatggcagacaataacgagggcgccgacggagtgggtaattcctcgggaaattggcattgcgattccacatggatgggcgacagagtcatcaccaccagcacccgaacctgggccctgcccacctacaacaaccacctctacaaacaaatttccagccaatcaggagcctcgaacgacaatcactgctttggctacagcaccccttgggggtattttgacttcaacagattccactgccacttttcaccacgtgactggcaaagactcatcaacaacaactggggattccgacccaagagactcaacttcaagctctttaacattcaagtcaaagaggtcacgcagaatgacggtacgacgacgattgccaataaccttaccagcacggttcaggtgtttactgactcggagtaccagctcccgtacgtcctcggctcggcgcatcaaggatgcctcccgccgttcccagcagacgtcttcatggtgccacagtatggatacctcaccctgaacaacgggagtcaggcagtaggacgctcttcattttactgcctggagtactttccttctcagatgctgcgtaccggaaacaactttaccttcagctacacttttgaggacgttcctttccacagcagctacgctcacagccagagtctggaccgtctcatgaatcctctcatcgaccagtacctgtattacttgagcagaacaaacactccaagtggaaccaccacgcagtcaaggcttcagttttctcaggccggagcgagtgacattcgggaccagtctaggaactggcttcctggaccctgttaccgccagcagcgagtatcaaagacatctgcggataacaacaacagtgaatactcgtggactggagctaccaagtaccacctcaatggcagagactctctggtgaatccgggcccggccatggcaagccacaaggacgatgaagaaaagttttttcctcagagcggggttctcatctttgggaagcaaggctcagagaaaacaaatgtggacattgaaaaggtcatgattacagacgaagaggaaatcaggacaaccaatcccgtggctacggagcagtatggttctgtatctaccaacctccagagaggcaacagacaagcagctaccgcagatgtcaacacacaaggcgttcttccaggcatggtctggcaggacagagatgtgtaccttcaggggcccatctgggcaaagattccacacacggacggacattttcacccctctcccctcatgggtggattcggacttaaacaccctcctccacagattctcatcaagaacaccccggtacctgcgaatccttcgaccaccttcagtgcggcaaagtttgcttccttcatcacacagtactccacgggacaggtcagcgtggagatcgagtgggagctgcagaaggaaaacagcaaacgctggaatcccgaaattcagtacacttccaactacaacaagtctgttaatgtggactttactgtggacactaatggcgtgtattcagagcctcgccccattggcaccagatacctgactcgtaatctgtaa

SEQ ID NO: 12930 - DNA, 2208 bp, Artificial Sequence
  source: /note="Description of Artificial Sequence: Synthetic polynucleotide"
atggctgccgatggttatcttccagattggctcgaggacactctctctgaaggaataagacagtggtggaagctcaaacctggcccaccaccaccaaagcccgcagagcggcataaggacgacagcaggggtcttgtgcttcctgggtacaagtacctcggacccttcaacggactcgacaagggagagccggtcaacgaggcagacgccgcggccctcgagcacgacaaagcctacgaccggcagctcgacagcggagacaacccgtacctcaagtacaaccacgccgacgcggagtttcaggagcgccttaaagaagatacgtcttttgggggcaacctcggacgagcagtcttccaggcgaaaaagagggttcttgaacctctgggcctggttgaggaacctgttaagacggctccgggaaaaaagaggccggtagagcactctcctgtggagccagactcctcctcgggaaccggaaaggcgggccagcagcctgcaagaaaaagattgaattttggtcagactggagacgcagactcagtacctgacccccagcctctcggacagccaccagcagccccctctggtctgggaactaatacgatggctacaggcagtggcgcaccaatggcagacaataacgagggcgccgacggagtgggtaattcctcgggaaattggcattgcgattccacatggatgggcgacagagtcatcaccaccagcacccgaacctgggccctgcccacctacaacaaccacctctacaaacaaatttccagccaatcaggagcctcgaacgacaatcactactttggctacagcaccccttgggggtattttgacttcaacagattccactgccacttttcaccacgtgactggcaaagactcatcaacaacaactggggattccgacccaagagactcaacttcaagctctttaacattcaagtcaaagaggtcacgcagaatgacggtacgacgacgattgccaataaccttaccagcacggttcaggtgtttactgactcggagtaccagctcccgtacgtcctcggctcggcgcatcaaggatgcctcccgccgttcccagcagacgtcttcatggtgccacagtatggatacctcaccctgaacaacgggagtcaggcagtaggacgctcttcattttactgcctggagtactttccttctcagatgctgcgtaccggaaacaactttaccttcagctacacttttgaggacgttcctttccacagcagctacgctcacagccagagtctggaccgtctcatgaatcctctcatcgaccagtacctgtattacttgagcagaacaaacactccaagtggaaccaccacgcagtcaaggcttcagttttctcaggccggagcgagtgacattcgggaccagtctaggaactggcttcctggaccctgttaccgccagcagcgagtatcaaagacatctgcggataacaacaacagtgaatactcgtggactggagctaccaagtaccacctcaatggcagagactctctggtgaatccgggcccggccatggcaagccacaaggacgatgaagaaaagttttttcctcagagcggggttctcatctttgggaagcaaggctcagagaaaacaaatgtggacattgaaaaggtcatgattacagacgaagaggaaatcaggacaaccaatcccgtggctacggagcagtatggttctgtatctaccaacctccagagaggcaacagacaagcagctaccgcagatgtcaacacacaaggcgttcttccaggcatggtctggcaggacagagatgtgtaccttcaggggcccatctgggcaaagattccacacacggacggacattttcacccctctcccctcatgggtggattcggacttaaacaccctcctccacagattctcatcaagaacaccccggtacctgcgaatccttcgaccaccttcagtgcggcaaagtttgcttccttcatcacacagtactccacgggacaggtcagcgtggagatcgagtgggagctgcagaaggaaaacagcaaacgctggaatcccgaaattcagtacacttccaactacaacaagtctgttaatgcggactttactgtggacactaatggcgtgtattcagagcctcgccccattggcaccagatacctgactcgtaatctgtaa

SEQ ID NO: 12931 - DNA, 2208 bp, Artificial Sequence
  source: /note="Description of Artificial Sequence: Synthetic polynucleotide"
atggctgccgatggttatcttccagattggctcgaggacactctctctgaaggaataagacagtggtggaagctcaaacctggcccaccaccaccaaagcccgcagagcggcatagggacgacagcaggggtcttgtgcttcctgggtacaagtacctcggacccttcaacggactcgacaagggagagccggtcaacgaggcagacgccgcggccctcgagcacgacaaagcctacgaccggcagctcgacagcggagacaacccgtacctcaagtacaaccacgccgacgcggagtttcaggagcgccttaaagaagatacgtcttttgggggcaacctcggacgagcagtcttccaggcgaaaaagagggttcttgaacctctgggcctggttgaggaacctgttaagacggctccgggaaaaaagaggccggtagagcactctcctgtggagccagactcctcctcgggaaccggaaaggcgggccagcagcctgcaagaaaaagattgaattttggtcagactggagacgcagactcagtacctgacccccagcctctcggacagccaccagcagccccctctggtctgggaactaatacgatggctacaggcagtggcgcaccaatggcagacaataacgagggcgccgacggagtgggtaattcctcgggaaattggcattgcgattccacatggatgggcgacagagtcatcaccaccagcacccgaacctgggccctgcccacctacaacaaccacctctacaaacaaatttccagccaatcaggagcctcgaacggcaatcactactttggctacagcaccccttgggggtattttgacttcaacagattccactgccacttttcaccacgtgactggcaaagactcatcaacaacaactggggattccgacccaagagactcaacttcaagctctttaacattcaagtcaaagaggtcacgcagaatgacggtacgacgacgattgccaataaccttaccagcacggttcaggtgtttactgactcggagtaccagctcccgtacgtcctcggctcggcgcatcaaggatgcctcccgccgttcccagcagacgtcttcatggtgccacagtatggatacctcaccctgaacaacgggagtcaggcagtaggacgctcttcattttactgcctggagtactttccttctcagatgctgcgtaccggaaacaactttaccttcagctacacttttgaggacgttcctttccacagcagctacgctcacagccagagtctggaccgtctcatgaatcctctcatcgaccagtacctgtattacttgagcagaacaaacactccaagtggaaccaccacgcagtcaaggcttcagttttctcaggccggagcgagtgacattcgggaccagtctaggaactggcttcctggaccctgttaccgccagcagcgagtatcaaagacatctgcggataacaacaacagtgaatactcgtggactggagctaccaagtaccacctcaatggcagagactctctggtgaatccgggcccggccatggcaagccacaaggacgatgaagaaaagttttttcctcagagcggggttctcatctttgggaagcaaggctcagagaaaacaaatgtggacattgaaaaggtcatgattacagacgaagaggaaatcaggacaaccaatcccgtggctacggagcagtatggttctgtatctaccaacctccagaggggcaacagacaagcagctaccgcagatgtcaacacacaaggcgttcttccaggcatggtctggcaggacagagatgtgtaccttcaggggcccatctgggcaaagattccacacacggacggacattttcacccctctcccctcatgggtggattcggacttaaacaccctcctccacagattctcatcaagaacaccccggtacctgcgaatccttcgaccaccttcagtgcggcaaagtttgcttccttcatcacacagtactccacgggacaggtcagcgtggagatcgagtgggagctgcagaaggaaaacagcaaacgctggaatcccgaaattcagtacacttccaactacaacaagtctgttaatgtggactttactgtggacactaatggcgtgtattcagagcctcgccccattggcaccagatacctgactcgtaatctgtaa

SEQ ID NO: 12932 - DNA, 2208 bp, Artificial Sequence
  source: /note="Description of Artificial Sequence: Synthetic polynucleotide"
atggctgccgatggttatcttccagattggctcgaggacactctctctgaaggaataagacagtggtggaagctcaaacctggcccaccaccaccaaagcccgcagagcggcataaggacgacagcaggggtcttgtgcttcctgggtacaagtacctcggacccttcaacggactcgacaagggagagccggtcaacgaggcagacgccgcggccctcgagcacgacaaagcctacgaccggcagctcgacagcggagacaacccgtacctcaagtacaaccacgccgacgcggagtttcaggagcgccttaaagaagatacgtcttttgggggcaacctcggacgagcagtcttccaggcgaaaaagagggttcttgaacctctgggcctggttgaggaacctgttaagacggctccgggaaaaaagaggccggtagagcactctcctgtggagccagactcctcctcgggaaccggaaaggcgggccagcagcctgcaagaaaaagattgaattttggtcagactggagacgcagactcagtacctgacccccagcctctcggacagccaccagcagccccctctggtctgggaactaatacgatggctacaggcagtggcgcaccaatggcagacaataacgagggcgccgacggagtgggtaattcctcgggaaattggcattgcgattccacatggatgggcgacagagtcatcaccaccagcacccgaacctgggccctgcccacctacaacaaccacctctacaaacaaatttccagccaatcaggagcctcgaacgacaatcactactttggctacagcaccccttgggggtattttgacttcaacagattccactgccacttttcaccacgtgactggcaaagactcatcaacaacaactggggattccgacccaagagactcaacttcaagctctttaacattcaagtcaaagaggtcacgcagaatgacggtacgacgacgattgccaataaccttaccagcacggttcaggtgtttactgactcggagtaccagctcccgtacgtcctcggctcggcgcatcaaggatgcctcccgccgttcccagcagacgtcttcatggtgccacagtatggatacctcaccctgaacaacgggagtcgggcagtaggacgctcttcattttactgcctggagtactttccttctcagatgctgcgtaccggaaacaactttaccttcagctacacttttgaggacgttcctttccacagcagctacgctcacagccagagtctggaccgtctcatgaatcctctcatcgaccagtacctgtattacttgagcagaacaaacactccaagtggaaccaccacgcagtcaaggcttcagttttctcaggccggagcgagtgacattcgggaccagtctaggaactggcttcctggaccctgttaccgccagcagcgagtatcaaaggcatctgcggataacaacaacagtgaatactcgtggactggagctaccaagtaccacctcaatggcagagactctctggtgaatccgggcccggccatggcaagccacaaggacgatgaagaaaagttttttcctcagagcggggttctcatctttgggaagcaaggctcagagaaaacaaatgtggacattgaaaaggtcatgattacagacgaagaggaaatcaggacaaccaatcccgtggctacggagcagtatggttctgtatctaccaacctccagagaggcaacagacaagcagctaccgcagatgtcaacacacaaggcgttcttccaggcatggtctggcaggacagagatgtgtaccttcaggggcccatctgggcaaagattccacacacggacggacattttcacccctctcccctcatgggtggattcggacttaaacaccctcctccacagattctcatcaagaacaccccggtacctgcgaatccttcgaccaccttcagtgcggcaaagtttgcttccttcatcacacagtactccacgggacaggtcagcgtggagatcgagtgggagctgcagaaggaaaacagcaaacgctggaatcccgaaattcagtacacttccaactacaacaagtctgttaatgtggactttactgtggacactaatggcgtgtattcagagcctcgccccattggcaccagatacctgactcgtaatctgtaa

SEQ ID NO: 12933 - DNA, 2208 bp, Artificial Sequence
  source: /note="Description of Artificial Sequence: Synthetic polynucleotide"
atggctgccgatggttatcttccagattggctcgaggacactctctctgaaggaataagacagtggtggaagctcaaacctggcccaccaccaccaaagcccgcagagcggcatagggacgacagcaggggtcttgtgcttcctgggtacaagtacctcggacccttcaacggactcgacaagggagagccggtcaacgaggcagacgccgcggccctcgagcacgacaaagcctacgaccggcagctcgacagcggagacaacccgtacctcaagtacaaccacgccgacgcggagtttcaggagcgccttaaagaagatacgtcttttgggggcaacctcggacgagcagtcttccaggcgaaaaagagggttcttgaacctctgggcctggttgaggaacctgttaagacggctccgggaaaaaagaggccggtagagcactctcctgtggagccagactcctcctcgggaaccggaaaggcgggccagcagcctgcaagaaaaagattgaattttggtcagactggagacgcagactcagtacctgacccccagcctctcggacagccaccagcagccccctctggtctgggaactaatacgatggctacaggcagtggcgcaccaatggcagacaataacgagggcgccgacggagtgggtaattcctcgggaaattggcattgcgattccacatggatgggcgacagagtcatcaccaccagcacccgaacctgggccctgcccacctacaacaaccacctctacaaacaaatttccagccaatcaggagcctcgaacggcaatcactactttggctacagcaccccttgggggtattttgacttcaacagattccactgccacttttcaccacgtgactggcaaagactcatcaacaacaactggggattccgacccaagagactcaacttcaagctctttaacattcaagtcaaagaggtcacgcagaatgacggtacgacgacgattgccaataaccttaccagcacggttcaggtgtttactgactcggagtaccagctcccgtacgtcctcggctcggcgcatcaaggatgcctcccgccgttcccagcagacgtcttcatggtgccacagtatggatacctcaccctgaacaacgggagtcaggcagtaggacgctcttcattttactgcctggagtactttccttctcagatgctgcgtaccggaaacaactttaccttcagctacacttttgaggacgttcctttccacagcagctacgctcacagccagagtctggaccgtctcatgaatcctctcatcgaccagtacctgtattacttgagcagaacaaacactccaagtggaaccaccacgcagtcaaggcttcagttttctcaggccggagcgagtggcattcgggaccagtctaggaactggcttcctggaccctgttaccgccagcagcgagtatcaaagacatctgcggataacaacaacagtgaatactcgtggactggagctaccaagtaccacctcaatggcagagactctctggtgaatccgggcccggccatggcaagccacaaggacgatgaagaaaagttttttcctcagagcggggttctcatctttgggaagcaaggctcagagaaaacaaatgtggacattgaaaaggtcatgattacagacgaagaggaaatcaggacaaccaatcccgtggctacggagcagtatggttctgtatctaccaacctccagaggggcaacagacaagcagctaccgcagatgtcaacacacaaggcgttcttccaggcatggtctggcaggacagagatgtgtaccttcaggggcccatctgggcaaagattccacacacggacggacattttcacccctctcccctcatgggtggattcggacttaaacaccctcctccacagattctcatcaagaacaccccggtacctgcgaatccttcgaccaccttcagtgcggcaaagtttgcttccttcatcacacagtactccacgggacaggtcagcgtggagatcgagtgggagctgcagaaggaaaacagcaaacgctggaatcccgaaattcagtacacttccaactacaacaagtctgttaatgtggactttactgtggacactaatggcgtgtattcagagcctcgccccattggcaccagatacctgactcgtaatctgtaa

SEQ ID NO: 12934 - DNA, 2208 bp, Artificial Sequence
  source: /note="Description of Artificial Sequence: Synthetic polynucleotide"
atggctgccgatggttatcttccagattggctcgaggacactctctctgaaggaataagacagtggtggaagctcaaacctggcccaccaccaccaaagcccgcagagcggcatagggacgacagcaggggtcttgtgcttcctgggtacaagtacctcggacccttcaacggactcgacaagggagagccggtcaacgaggcagacgccgcggccctcgagcacgacaaagcctacgaccggcagctcgacagcggagacaacccgtacctcaagtacaaccacgccgacgcggagtttcaggagcgccttaaagaagatacgtcttttgggggcaacctcggacgagcagtcttccaggcgaaaaagagggttcttgaacctctgggcctggttgaggaacctgttaagacggctccgggaaaaaagaggccggtagagcactctcctgtggagccagactcctcctcgggaaccggaaaggcgggccagcagcctgcaagaaaaagattgaattttggtcagactggagacgcagactcagtacctgacccccagcctctcggacagccaccagcagccccctctggtctgggaactaatacgatggctacaggcagtggcgcaccaatggcagacaataacgagggcgccgacggagtgggtaattcctcgggaaattggcattgcgattccacatggatgggcgacagagtcatcaccaccagcacccgaacctgggccctgcccacctacaacaaccacctctacaaacaaatttccagccaatcaggagcctcgaacggcaatcactactttggctacagcaccccttgggggtattttgacttcaacagattccactgccacttttcaccacgtgactggcaaagactcatcaacaacaactggggattccgacccaagagactcaacttcaagctctttaacattcaagtcaaagaggtcacgcagaatgacggtacgacgacgattgccaataaccttaccagcacggttcaggtgtttactgactcggagtaccagctcccgtacgtcctcggctcggcgcatcaaggatgcctcccgccgttcccagcagacgtcttcatggtgccacagtatggatacctcaccctgaacaacgggagtcaggcagtaggacgctcttcattttactgcctggagtactttccttctcagatgctgcgtaccggaaacaactttaccttcagctacacttttgaggacgttcctttccacagcaactacgctcacagccagagtctggaccgtctcatgaatcctctcatcgaccagtacctgtattacttgagcagaacaaacactccaagtggaaccaccacgcagtcaaggcttcagttttctcaggccggagcgagtgacattcgggaccagtctaggaactggcttcctggaccctgttaccgccagcagcgagtatcaaagacatctgcggataacaacaacagtgaatactcgtggactggagctaccaagtaccacctcaatggcagagactctctggtgaatccgggcccggccatggcaagccacaaggacgatgaagaaaagttttttcctcagagcggggttctcatctttgggaagcaaggctcagagaaaacaaatgtggacattgaaaaggtcatgattacagacgaagaggaaatcaggacaaccaatcccgtggctacggagcagtatggttctgtatctaccaacctccagaggggcaacagacaagcagctaccgcagatgtcaacacacaaggcgttcttccaggcatggtctggcaggacagagatgtgtaccttcaggggcccatctgggcaaagattccacacacggacggacattttcacccctctcccctcatgggtggattcggacttaaacaccctcctccacagattctcatcaagaacaccccggtacctgcgaatccttcgaccaccttcagtgcggcaaagtttgcttccttcatcacacagtactccacgggacaggtcagcgtggagatcgagtgggagctgcagaaggaaaacagcaaacgctggaatcccgaaattcagtacacttccaactacaacaagtctgttaatgtggactttactgtggacactaatggcgtgtattcagagcctcgccccattggcaccagatacctgactcgtaatctgtaa

SEQ ID NO: 12935 - DNA, 2208 bp, Artificial Sequence
  source: /note="Description of Artificial Sequence: Synthetic polynucleotide"
atggctgccgatggttatcttccagattggctcgaggacactctctctgaaggaataagacagtggtggaagctcaaacctggcccaccaccaccaaagcccgcagagcggcataaggacgacagcaggggtcttgtgcttcctgggtacaagtacctcggacccttcaacggactcgacaagggagagccggtcaacgaggcagacgccgcggccctcgagcacgacaaagcctacgaccggcagctcgacagcggagacaacccgtacctcaagtacaaccacgccgacgcggagtttcaggagcgccttaaagaagatacgtcttttgggggcaacctcggacgagcagtcttccaggcgaaaaagagggttcttgaacctctgggcctggttgaggaacctgttaagacggctccgggaaaaaagaggccggtagagcactctcctgtggagccagactcctcctcgggaaccggaaaggcgggccagcagcctgcaagaaaaagattgaattttggtcagactggagacgcagactcagtacctgacccccagcctctcggacagccaccagcagccccctctggtctgggaactaatacgatggctacaggcagtggcgcaccaatggcagacaataacgagggcgccgacggagtgggtaattcctcgggaaattggcattgcgattccacatggatgggcgacagagtcatcaccaccagcacccgaacctgggccctgcccacctacaacaaccacctctacaaacaaatttccagccaatcaggagcctcgaacgacaatcactactttggctacagcaccccttgggggtattttgacttcaacagattccactgccacttttcaccacgtgactggcaaagactcatcaacaacaactggggattccgacccaagagactcaacttcaagctctttaacattcaagtcaaagaggtcacgcagaatgacggtacgacgacgattgccaataaccttaccagcacggttcaggtgtttactgactcggagtaccagctcccgtacgtcctcggctcggcgcatcaaggatgcctcccgccgttcccagcagacgtcttcatggtgccacagtatggatacctcaccctgaacaacgggagtcaggcagtaggacgctcttcattttactgcctggagtactttccttctcagatgctgcgtaccggaaacaactttaccttcagctacacttttgaggacgttcctttccacagcagctacgctcacagccagagtctggaccgtctcatgaatcctctcatcgaccagtacctgtattacttgagcagaacaaacactccaagtggaaccaccacgcagtcaaggcttcagttttctcaggccggagcgagtgacattcgggaccagtctaggaactggcttcctggaccctgttaccgccagcagcgagtatcaaagacatctgcggataacaacaacagtgaatactcgtggactggagctaccaagtaccacctcaatggcagagactctctggtgaatccgggcccggccatggcaagccacaaggacgatgaagaaaagttttttcctcagagcggggttctcatctttgggaagcaaggctcagagaaaacaaatgtggacattgaaaaggtcatgattacagacgaagaggaaatcaggacaaccaatcccgtggctacggagcagtatggttctgtatctaccaacctccagagaggcaacagacaagcagctaccgcagatgtcaacacacaaggcgttcttccaggcatggtctggcaggacagagatgtgtaccttcaggggcccatctgggcaaagattccacacacggacggacattttcacccctctcccctcatgggtggattcggacttaaacaccctcctccacagattctcatcaagaacaccccggtacctgcgaatccttcgaccaccttcagtgcggcaaagtttgcttccttcatcacacagtactccgcgggacaggtcagcgtggagatcgagtgggagctgcagaaggaaaacagcaaacgctggaatcccgaaattcagtacacttccaactacaacaagtctgttaatgtggactttactgtggacactaatggcgtgtattcagagcctcgccccattggcaccagatacctgactcgtaatctgtaa

SEQ ID NO: 12936 - DNA, 2208 bp, Artificial Sequence
  source: /note="Description of Artificial Sequence: Synthetic polynucleotide"
atggctgccgatggttatcttccagattggctcgaggacactctctctgaaggaataagacagtggtggaagctcaaacctggcccaccaccaccaaagcccgcagagcggcataaggacgacagcaggggtcttgtgcttcctgggtacaagtacctcggacccttcaacggactcgacaagggagagccggtcaacgaggcagacgccgcggccctcgagcacgacaaagcctacgaccggcagctcgacagcggagacaacccgtacctcaagtacaaccacgccgacgcggagtttcaggagcgccttaaagaagatacgtcttttgggggcaacctcggacgagcagtcttccaggcgaaaaagagggttcttgaacctctgggcctggttgaggaacctgttaagacggctccgggaaaaaagaggccggtagagcactctcctgtggagccagactcctcctcgggaaccggaaaggcgggccagcagcctgcaagaaaaagattgaattttggtcagactggagacgcagactcagtacctgacccccagcctctcggacagccaccagcagccccctctggtctgggaactaatacgatggctacaggcagtggcgcaccaatggcagacaataacgagggcgccgacggagtgggtaattcctcgggaaattggcattgcgattccacatggatgggcgacagagtcatcaccaccagcacccgaacctgggccctgcccacctacaacaaccacctctacaaacaaatttccagccaatcaggagcctcgaacgacaatcactactttggctacagcaccccttgggggtattttgacttcaacagattccactgccacttttcaccacgtgactggcaaagactcatcaacaacaactggggattccgacccaagagactcaacttcaagctctttaacattcaagtcaaagaggtcacgcagaatgacggtacgacgacgattgccaataaccttaccagcacggttcaggtgtttactgactcggagtaccagctcccgtacgtcctcggctcggcgcatcaaggatgcctcccgccgttcccagcagacgtcttcatggtgccacagtatggatacctcaccctgaacaacgggagtcaggcagtaggacgctcttcattttactgcctggagtactttccttctcagatgctgcgtaccggaaacaactttaccttcagctacacttttgaggacgttcctttccacagcagctacgctcacagccagagtctggaccgtctcatgaatcctctcatcgaccagtacctgtattacttgagcagaacaaacactccaagtggaaccaccacgcagtcaaggcttcagttttctcaggccggagcgagtgacattcgggaccagtctaggaactggcttcctggaccctgttaccgccagcagcgagtatcaaagacatctgcggataacaacaacagtgaatactcgtggactggagctaccaagtaccacctcaatggcagagactctctggtgaatccgggcccggccatggcaagccacaaggacgatgaagaaaagttttttcctcagagcggggttctcatctttgggaagcaaggctcagagaaaacaaatgtggacattgaaaaggtcatgattacagacgaagaggaaatcaggacaaccaatcccgtggctacggagcagtatggttctgtatctaccaacctccagagaggcaacagacaagcagctaccgcagatgtcaacacacaaggcgttcttccaggcatggtctggcaggacagagatgtgtaccttcaggggcccatctgggcaaagattccacacacggacggacattttcacccctctcccctcatgggtggattcggacttaaacaccctcctccacagattctcatcaagaacaccccggtacctgcgaatccttcgaccaccttcagtgcggcaaagtttgcttccttcatcacacagtactccacgggacaggtcagcgtggagatcgagtgggagctgcagaaggaaaacagcaaacgctggaatcccgaaattcagtacacttccaactacaacaagtctgttaatgtggactttactgtggacactgatggcgtgtattcagagcctcgccccattggcaccagatacctgactcgtaatctgtaa

SEQ ID NO: 12937 - DNA, 2208 bp, Artificial Sequence
  source: /note="Description of Artificial Sequence: Synthetic polynucleotide"
atggctgccgatggttatcttccagattggctcgaggacactctctctgaaggaataagacagtggtggaagctcaaacctggcccaccaccaccaaagcccgcagagcggcataaggacgacagcaggggtcttgtgcttcctgggtacaagtacctcggacccttcaacggactcgacaagggagagccggtcaacgaggcagacgccgcggccctcgagcacgacaaagcctacgaccggcagctcgacagcggagacaacccgtacctcaagtacaaccacgccgacgcggagtttcaggagcgccttaaagaagatacgtcttttgggggcaacctcggacgagcagtcttccaggcgaaaaagagggttcttgaacctctgggcctggttgaggaacctgttaagacggctccgggaaaaaagaggccggtagagcactctcctgtggagccagactcctcctcgggaaccggaaaggcgggccagcagcctgcaagaaaaagattgaattttggtcagactggagacgcagactcagtacctgacccccagcctctcggacagccaccagcagccccctctggtctgggaactaatacgatggctacaggcagtggcgcaccaatggcagacaataacgagggcgccgacggagtgggtaattcctcgggaaattggcattgcgattccacatggatgggcgacagagtcatcaccaccagcacccgaacctgggccctgcccacctacaacaaccacctctacaaacaaatttccagccaatcaggagcctcgaacgacaatcactactttggctacagcaccccttgggggtattttgacttcaacagattccactgccacttttcaccacgtgactggcaaagactcatcaacaacaactggggattccgacccaagagactcaacttcaagctctttaacattcaagtcaaagaggtcacgcagaatgacggtacgacgacgattgccaataaccttaccagcacggttcaggtgtttactgactcggagtaccagctcccgtacgtcctcggctcggcgcatcaaggatgcctcccgccgttcccagcagacgtcttcatggtgccacagtatggatacctcaccctgaacaacgggagtcaggcagtaggacgctcttcattttactgcctggagtactttccttctcagatgctgcgtaccggaaacaactttaccttcagctacacttttgaggacgttcctttccacagcagctacgctcacagccagagtctggaccgtctcatgaatcctctcatcgaccagtacctgtattacttgagcagaacaaacactccaagtggaaccaccacgcagtcaaggcttcagttttctcaggccggagcgagtgacattcgggaccagtctaggaactggcttcctggaccctgttaccgccagcagcgagtatcaaagacatctgcggataacaacaacagtgaatactcgtggactggagctaccaagtaccacctcaatggcagagactctctggtgaatccgggcccggccatggcaagccacaaggacgatgaagaaaagttttttcctcagagcggggttctcatctttgggaagcaaggctcagagaaaacaaatgtggacattgaaaaggtcatgattacagacgaagaggaaatcaggacaaccaatcccgtggctacggagcagtatggttctgtatctaccaacctccagagaggcaacagacaagcagctaccgcagatgtcaacacacaaggcgttcttccaggcatggtctggcagggcagagatgtgtaccttcaggggcccatctgggcaaagattccacacacggacggacattttcacccctctcccctcatgggtggattcggacttaaacaccctcctccacagattctcatcaagaacaccccggtacctgcgaatccttcgaccaccttcagtgcggcaaagtttgcttccttcatcacacagtactccacgggacaggtcagcgtggagatcgagtgggagctgcagaaggaaaacagcaaacgctggaatcccgaaattcagtacacttccaactacaacaagtctgttaatgtggactttactgtggacactaatggcgtgtattcagagcctcgccccattggcaccagatacctgactcgtaatctgtaa

SEQ ID NO: 12938 - DNA, 2208 bp, Artificial Sequence
  source: /note="Description of Artificial Sequence: Synthetic polynucleotide"
atggctgccgatggttatcttccagattggctcgaggacactctctctgaaggaataagacagtggtggaagctcaaacctggcccaccaccaccaaagcccgcagagcggcataaggacgacagcaggggtcttgtgcttcctgggtacaagtacctcggacccttcaacggactcgacaagggagagccggtcaacgaggcagacgccgcggccctcgagcacgacaaagcctacgaccggcagctcgacagcggagacaacccgtacctcaagtacaaccacgccgacgcggagtttcaggagcgccttaaagaagatacgtcttttgggggcaacctcggacgagcagtcttccaggcgaaaaagagggttcttgaacctctgggcctggttgaggaacctgttaagacggctccgggaaaaaaggggccggtagagcactctcctgtggagccagactcctcctcgggaaccggaaaggcgggccagcagcctgcaagaaaaagattgaattttggtcagactggagacgcagactcagtacctgacccccagcctctcggacagccaccagcagccccctctggtctgggaactaatacgatggctacaggcagtggcgcaccaatggcagacaataacgagggcgccgacggagtgggtaattcctcgggaaattggcattgcgattccacatggatgggcgacagagtcatcaccaccagcacccgaacctgggccctgcccacctacaacaaccacctctacaaacaaatttccagccaatcaggagcctcgaacgacaatcactactttggctacagcaccccttgggggtattttgacttcaacagattccactgccacttttcaccacgtgactggcaaagactcatcaacaacaactggggattccgacccaagagactcaacttcaagctctttaacattcaagtcaaagaggtcacgcagaatgacggtacgacgacgattgccaataaccttaccagcacggttcaggtgtttactgactcggagtaccagctcccgtacgtcctcggctcggcgcatcaaggatgcctcccgccgttcccagcagacgtcttcatggtgccacagtatggatacctcaccctgaacaacgggagtcaggcagtaggacgctcttcattttactgcctggagtactttccttctcagatgctgcgtaccggaaacaactttaccttcagctacacttttgaggacgttcctttccacagcagctacgctcacagccagagtctggaccgtctcatgaatcctctcatcgaccagtacctgtattacttgagcagaacaaacactccaagtggaaccaccacgcagtcaaggcttcagttttctcaggccggagcgagtgacattcgggaccagtctaggaactggcttcctggaccctgttaccgccagcagcgagtatcaaagacatctgcggataacaacaacagtgaatactcgtggactggagctaccaagtaccacctcaatggcagagactctctggtgaatccgggcccggccatggcaggccacaaggacgatgaagaaaagttttttcctcagagcggggttctcatctttgggaagcaaggctcagagaaaacaaatgtggacattgaaaaggtcatgattacagacgaagaggaaatcaggacaaccaatcccgtggctacggagcagtatggttctgtatctaccaacctccagagaggcaacagacaagcagctaccgcagatgtcaacacacaaggcgttcttccaggcatggtctggcaggacagagatgtgtaccttcaggggcccatctgggcaaagattccacacacggacggacattttcacccctctcccctcatgggtggattcggacttaaacaccctcctccacagattctcatcaagaacaccccggtacctgcgaatccttcgaccaccttcagtgcggcaaagtttgcttccttcatcacacagtactccacgggacaggtcagcgtggagatcgagtgggagctgcagaaggaaaacagcaaacgctggaatcccgaaattcagtacacttccaactacaacaagtctgttaatgtggactttactgtggacactaatggcgtgtattcagagcctcgccccattggcaccagatacctgactcgtaatctgtaa

SEQ ID NO: 12939 - DNA, 2208 bp, Artificial Sequence
  source: /note="Description of Artificial Sequence: Synthetic polynucleotide"
atggctgccgatggttatcttccagattggctcgaggacactctctctgaaggaataagacagtggtggaagctcaaacctggcccaccaccaccaaagcccgcagagcggcataaggacgacagcaggggtcttgtgcttcctgggtacaagtacctcggacccttcaacggactcgacaagggagagccggtcaacgaggcagacgccgcggccctcgagcacgacaaagcctacgaccggcagctcgacagcggagacaacccgtacctcaagtacaaccacgccgacgcggagtttcaggagcgccttaaagaagatacgtcttttgggggcaacctcggacgagcagtcttccaggcgaaaaagagggttcttgaacctctgggcctggttgaggaacctgttaagacggctccgggaaaaaagaggctggtagagcactctcctgtggagccagactcctcctcgggaaccggaaaggcgggccagcagcctgcaagaaaaagattgaattttggtcagactggagacgcagactcagtacctgacccccagcctctcggacagccaccagcagccccctctggtctgggaactaatacgatggctacaggcagtggcgcaccaatggcagacaataacgagggcgccgacggagtgggtaattcctcgggaaattggcattgcgattccacatggatgggcgacagagtcatcaccaccagcacccgaacctgggccctgcccacctacaacaaccacctctacaaacaaatttccagccaatcaggagcctcgaacgacaatcactactttggctacagcaccccttgggggtattttgacttcaacagattccactgccacttttcaccacgtgactggcaaagactcatcaacaacaactggggattccgacccaagagactcaacttcaagctctttaacattcaagtcaaagaggtcacgcagaatgacggtacgacgacgattgccaataaccttaccagcacggttcaggtgtttactgactcggagtaccagctcccgtacgtcctcggctcggcgcatcaaggatgcctcccgccgttcccagcagacgtcttcatggtgccacagtatggatacctcaccctgaacaacgggagtcaggcagtaggacgctcttcattttactgcctggagtactttccttctcagatgctgcgtaccggaaacaactttaccttcagctacacttttgaggacgttcctttccacagcagctacgctcacagccagagtctggaccgtctcatgaatcctctcatcgaccagtacctgtattacttgagcagaacaaacactccaagtggaaccaccacgcagtcaaggcttcagttttctcaggccggagcgagtgacattcgggaccagtctaggaactggcttcctggaccctgttaccgccagcagcgagtatcaaagacatctgcggataacaacaacagtgaatactcgtggactggagctaccaagtaccacctcaatggcagagactctctggtgaatccgggcccggccatggcaagccacaaggacgatgaagaaaagttttttcctcagagcggggttctcatctttgggaagcaaggctcagagaaaacaaatgtggacattgaaaaggtcatgattacagacgaagaggaaatcaggacaaccaatcccgtggctacggagcagtatggttctgtatctaccaacctccagagaggcaacagacaagcagctaccgcagatgtcaacacacaaggcgttcttccaggcatggtctggcaggacagagatgtgtaccttcaggggcccatctgggcaaagattccacacacggacggacattttcacccctctcccctcatgggtggattcggacttaaacaccctcctccacagattctcatcaagaacaccccggtacctgcgaatccttcgaccaccttcagtgcggcaaagtttgcttccttcatcacacagtactccacgggacaggtcagcgtggagatcgagtgggagctgcagaaggaaaacagcaaacgctggaatcccgaaattcagtacacttccaactacaacaagtctgttaatgtggactttactgtggacactaatggcgtgtattcagagcctcgccccattggcaccagatacctgactcgtaatctgtaa

SEQ ID NO: 12940 - DNA, 2208 bp, Artificial Sequence
  source: /note="Description of Artificial Sequence: Synthetic polynucleotide"
atggctgccgatggttatcttccagattggctcgaggacactctctctgaaggaataagacagtggtggaagctcaaacctggcccaccaccaccaaagcccgcagagcggcataaggacgacagcaggggtcttgtgcttcctgggtacaagtacctcggacccttcaacggactcgacaagggagagccggtcaacgaggcaggcgccgcggccctcaagcacgacaaagcctacgaccggcagctcgacagcggagacaacccgtacctcaagtacaaccacgccgacgcggagtttcaggagcgccttaaagaagatacgtcttttgggggcaacctcggacgagcagtcttccaggcgaaaaagagggttcttgaacctctgggcctggttgaggaacctgttaagacggctccgggaaaaaagaggccggtagagcactctcctgtggagccagactcctcctcgggaaccggaaaggcgggccagcagcctgcaagaaaaagattgaattttggtcagactggagacgcagactcagtacctgacccccagcctctcggacagccaccagcagccccctctggtctgggaactaatacgatggctacaggcagtggcgcaccaatggcagacaataacgagggcgccgacggagtgggtaattcctcgggaaattggcattgcgattccacatggatgggcgacagagtcatcaccaccagcacccgaacctgggccctgcccacctacaacaaccacctctacaaacaaatttccagccaatcaggagcctcgaacgacaatcactactttggctacagcaccccttgggggtattttgacttcaacagattccactgccacttttcaccacgtgactggcaaagactcatcaacaacaactggggattccgacccaagagactcaacttcaagctctttaacattcaagtcaaagaggtcacgcagaatgacggtacgacgacgattgccaataaccttaccagcacggttcaggtgtttactgactcggagtaccagctcccgtacgtcctcggctcggcgcatcaaggatgcctcccgccgttcccagcagacgtcttcatggtgccacagtatggatacctcaccctgaacaacgggagtcaggcagtaggacgctcttcattttactgcctggagtactttccttctcagatgctgcgtaccggaaacaactttaccttcagctacacttttgaggacgttcctttccacagcagctacgctcacagccagagtctggaccgtctcatgaatcctctcatcgaccagtacctgtattacttgagcagaacaaacactccaagtggaaccaccacgcagtcaaggcttcagttttctcaggccggagcgagtgacattcgggaccagtctaggaactggcttcctggaccctgttaccgccagcagcgagtatcaaagacatctgcggataacaacaacagtgaatactcgtggactggagctaccaagtaccacctcaatggcagagactctctggtgaatccgggcccggccatggcaagccacaaggacgatgaagaaaagttttttcctcagagcggggttctcatctttgggaagcaaggctcagagaaaacaaatgtggacattgaaaaggtcatgattacagacgaagaggaaatcaggacaaccaatcccgtggctacggagcagtatggttctgtatctaccaacctccagagaggcaacagacaagcagctaccgcagatgtcaacacacaaggcgttcttccaggcatggtctggcaggacagagatgtgtaccttcaggggcccatctgggcaaagattccacacacggacggacattttcacccctctcccctcatgggtggattcggacttaaacaccctcctccacagattctcatcaagaacaccccggtacctgcgaatccttcgaccaccttcagtgcggcaaagtttgcttccttcatcacacagtactccacgggacaggtcagcgtggagatcgagtgggagctgcagaaggaaaacagcaaacgctggaatcccgaaattcagtacacttccaactacaacaagtctgttaatgtggactttactgtggacactaatggcgtgtattcagagcctcgccccattggcaccagatacctgactcgtaatctgtaa

SEQ ID NO: 12941 - DNA, 2208 bp, Artificial Sequence
  source: /note="Description of Artificial Sequence: Synthetic polynucleotide"
atggctgccgatggttatcttccagattggctcgaggacactctctctgaaggaataagacagtggtggaagctcaaacctggcccaccaccaccaaagcccgcagagcggcataaggacgacagcaggggtcttgtgcttcctgggtacaagtacctcggacccttcaacggactcgacaagggagagccggtcaacgaggcagacgccgcggccctcgagcacgacaaagcctacgaccggcagctcgacagcggagacaacccgtacctcaagtacaaccacgccgacgcggagtttcaggagcgccttaaagaagatacgtcttttgggggcaacctcggacgagcagtcttccaggcgaaaaagagggttcttgaacctctgggcctggttgaggaacctgttaagacggctccgggaaaaaagaggccggtagagcactctcctgtggagccagactcctcctcgggaaccggaaaggcgggccagcagcctgcaagaaaaagattgaattttggtcagactggagacgcagactcagtacctgacccccagcctctcggacagccaccagcagccccctctggtctgggaactaatacgatggctacaggcagtggcgcaccaatggcagacaataacgagggcgccgacggagtgggtaattcctcgggaaattggcattgcgattccacatggatgggcgacagagtcatcaccaccagcacccgaacctgggccctgcccacctacaacaaccacctctacaaacaaatttccagccaatcaggagcctcgaacgacaatcactactttggctacagcaccccttgggggtattttgacttcaacagattccactgccacttttcaccacgtgactggcaaagactcatcaacaacaactggggattccgacccaagagactcaacttcaagctctttaacattcaagtcaaagaggtcacgcagaatgacggtacgacgacgattgccaataaccttaccagcacggttcaggtgtttactgactcggagtaccagctcccgtacgtcctcggctcggcgcatcaaggatgcctcccgccgttcccagcagacgtcttcatggtgccacagtatggatacctcaccctgaacaacgggagtcaggcagtaggacgctcttcattttactgcctggagtactttccttctcagatgctgcgtaccggaaacaactttaccttcagctacacttttgaggacgttcctttccacagcagctacgctcacagccagagtctggaccgtctcatgaatcctctcatcgaccagtacctgtattacttgagcagaacaaacactccaagtggaaccaccacgcagtcaaggcttcagttttctcaggccggagcgagtggcattcgggaccagtctaggaactggcttcctggaccctgttaccgccagcagcgagtatcaaagacatctgcggataacaacaacagtgaatactcgtggactggagctaccaagtaccacctcaatggcagagactctctggtgaatccgggcccggccatggcaagccacaaggacgatgaagaaaagttttttcctcagagcggggttctcatctttgggaagcaaggctcagagaaaacaaatgtggacattgaaaaggtcatgattacagacgaagaggaaatcaggacaaccaatcccgtggctacggagcagtatggttctgtatctaccaacctccagagaggcaacagacaagcagctaccgcagatgtcaacacacaaggcgttcttccaggcatggtctggcaggacagagatgtgtaccttcaggggcccatctgggcaaagattccacacacggacggacattttcacccctctcccctcatgggtggattcggacttaaacaccctcctccacagattctcatcaagaacaccccggtacctgcgaatccttcgaccaccttcagtgcggcaaagtttgcttccttcatcacacagtactccacgggacaggtcagcgtggagatcgagtgggagctgcagaaggaaaacagcaaacgctggaatcccgaaattcagtacacttccaactacaacaagtctgttaatgtggactttactgtggacactaatggcgtgtattcagagcctcgccccattggcaccagatacctgactcgtaatctgtaa

SEQ ID NO: 12942 - DNA, 2208 bp, Artificial Sequence
  source: /note="Description of Artificial Sequence: Synthetic polynucleotide"
atggctgccgatggttatcttccagattggctcgaggacactctctctgaaggaataagacagtggtggaagctcaaacctggcccaccaccaccaaagcccgcagagcggcataaggacgacagcaggggtcttgtgcttcctgggtacaagtacctcggacccttcaacggactcgacaagggagagccggtcaacgaggcagacgccgcggccctcgagcacgacaaagcctacgaccggcagctcgacagcggagacaacccgtacctcaagtacaaccacgccgacgcggagtttcaggagcgccttaaagaagatacgtcttttgggggcaacctcggacgagcagtcttccaggcgaaaaagagggttcttgaacctctgggcctggttgaggaacctgttaagacggctccgggaaaaaagaggccggtagagcactctcctgtggagccagactcctcctcgggaaccggaaaggcgggccagcagcctgcaagaaaaagattgaattttggtcagactggagacgcagactcagtacctgacccccagcctctcggacagccaccagcagccccctctggtctgggaactaatacgatggctacaggcagtggcgcaccaatggcagacaataacgagggcgccgacggagtgggtaattcctcgggaaattggcattgcgattccacatggatgggcgacagagtcatcaccaccagcacccgaacctgggccctgcccacctacaacaaccacctctacaaacaaatttccagccaatcaggagcctcgaacgacaatcactactttggctacagcaccccttgggggtattttgacttcaacagattccactgccacttttcaccacgtgactggcaaagactcatcaacaacaactggggattccgacccaagagactcaacttcaagctctttaacattcaagtcaaagaggtcacgcagaatgacggtacgacgacgattgccaataaccttaccagcacggttcaggtgtttactgactcggagtaccagctcccgtacgtcctcggctcggcgcatcaaggatgcctcccgccgttcccagcagacgtcttcatggtgccacagtatggatacctcaccctgaacaacgggagtcaggcagtaggacgctcttcattttactgcctggagtactttccttctcagatgctgcgtaccggaaacaactttaccttcagctacacttttgaggacgttcctttccacagcagctacgctcacagccagagtctggaccgtctcatgaatcctctcatcgaccagtacctgtattacttgagcagagcaaacactccaagtggaaccaccacgcagtcaaggcttcagttttctcaggccggagcgagtgacattcgggaccagtctaggaactggcttcctggaccctgttaccgccagcagcgagtatcaaagacatctgcggataacaacaacagtgaatactcgtggactggagctaccaagtaccacctcaatggcagagactctctggtgaatccgggcccggccatggcaagccacaaggacgatgaagaaaagttttttcctcagagcggggttctcatctttgggaagcaaggctcagagaaaacaaatgtggacattgaaaaggtcatgattacagacgaagaggaaatcaggacaaccaatcccgtggctacggagcagtatggttctgtatctaccaacctccagagaggcaacagacaagcagctaccgcagatgtcaacacacaaggcgttcttccaggcatggtctggcaggacagagatgtgtaccttcaggggcccatctgggcaaagattccacacacggacggacattttcacccctctcccctcatgggtggattcggacttaaacaccctcctccacagattctcatcaagaacaccccggtacctgcgaatccttcgaccaccttcagtgcggcaaagtttgcttccttcatcacacagtactccacgggacaggtcagcgtggagatcgagtgggagctgcagaaggaaaacagcaaacgctggaatcccgaaattcagtacacttccaactacaacaagtctgttaatgtggactttactgtggacactaatggcgtgtattcagagcctcgccccattggcaccagatacctgactcgtaatctgtaa

SEQ ID NO: 12943 - DNA, 2208 bp, Artificial Sequence
  source: /note="Description of Artificial Sequence: Synthetic polynucleotide"
atggctgccgatggttatcttccagattggctcgaggacactctctctgaaggaataagacagtggtggaagctcaaacctggcccaccaccaccaaagcccgcagagcggcataaggacgacagcaggggtcttgtgcttcctgggtacaagtacctcggacccttcaacggactcgacaagggagagccggtcaacgaggcagacgccgcggccctcgagcacgacaaagcctacgaccggcagctcgacagcggagacaacccgtacctcaagtacaaccacgccgacgcggagtttcaggagcgccttaaagaagatacgtcttttgggggcaacctcggacgagcagtcttccaggcgaaaaagagggttcttgaacctctgggcctggttgaggaacctgttaagacggctccgggaaaaaagaggccggtagagcactctcctgtggagccagactcctcctcgggaaccggaaaggcgggccagcagcctgcaagaaaaagattgaattttggtcagactggagacgcagactcagtacctgacccccagcctctcggacagccaccagcagccccctctggtctgggaactaatacgatggctacaggcagtggcgcaccaatggcagacaataacgagggcgccgacggagtgggtaattcctcgggaaattggcattgcgattccacatggatgggcgacagagtcatcaccaccagcacccgaacccgggccctgcccacctacaacaaccacctctacaaacaaatttccagccaatcaggagcctcgaacgacaatcactactttggctacagcaccccttgggggtattttgacttcaacagattccactgccacttttcaccacgtgactggcaaagactcatcaacaacaactggggattccgacccaagagactcaacttcaagctctttaacattcaagtcaaagaggtcacgcagaatgacggtacgacgacgattgccaataaccttaccagcacggttcaggtgtttactgactcggagtaccagctcccgtacgtcctcggctcggcgcatcaaggatgcctcccgccgttcccagcagacgtcttcatggtgccacagtatggatacctcaccctgaacaacgggagtcaggcagtaggacgctcttcattttactgcctggagtactttccttctcagatgctgcgtaccggaaacaactttaccttcagctacacttttgaggacgttcctttccacagcagctacgctcacagccagagtctggaccgtctcatgaatcctctcatcgaccagtacctgtattacttgagcagaacaaacactccaagtggaaccaccacgcagtcaaggcttcagttttctcaggccggagcgagtgacattcgggaccagtctaggaactggcttcctggaccctgttaccgccagcagcgagtatcaaagacatctgcggataacaacaacagtgaatactcgtggactggagctaccaagtaccacctcaatggcagagactctctggtgaatccgggcccggccatggcaagccacaaggacgatgaagaaaagttttttcctcagagcggggttctcatctttgggaagcaaggctcagagaaaacaaatgtggacattgaaaaggtcatgattacagacgaagaggaaatcaggacaaccaatcccgtggctacggagcagtatggttctgtatctaccaacctccagagaggcaacagacaagcagctaccgcagatgtcaacacacaaggcgttcttccaggcatggtctggcaggacagagatgtgtaccttcaggggcccatctgggcaaagattccacacacggacggacattttcacccctctcccctcatgggtggattcggacttaaacaccctcctccacagattctcatcaagaacaccccggtacctgcgaatccttcgaccaccttcagtgcggcaaagtttgcttccttcatcacacagtactccacgggacaggtcagcgtggagatcgagtgggagctgcagaaggaaaacagcaaacgctggaatcccgaaattcagtacacttccaactacaacaagtctgttaatgtggactttactgtggacactaatggcgtgtattcagagcctcgccccattggcaccagatacctgactcgtaatctgtaa

SEQ ID NO: 12944 - DNA, 2208 bp, Artificial Sequence
  source: /note="Description of Artificial Sequence: Synthetic polynucleotide"
atggctgccgatggttatcttccagattggctcgaggacactctctctgaaggaataagacagtggtggaagctcaaacctggcccaccaccaccaaagcccgcagagcggcataaggacgacagcaggggtcttgtgcttcctgggtacaagtacctcggacccttcaacggactcgacaagggagagccggtcaacgaggcagacgccgcggccctcgagcacgacaaagcctacgaccggcagctcgacagcggagacaacccgtacctcaagtacaaccacgccgacgcggagtttcaggagcgccttaaagaagatacgtcttttgggggcaacctcggacgagcagtcttccaggcgaaaaagagggttcttgaacctctgggcctggttgaggaacctgttaagacggctccgggaaaaaagaggccggtagagcactctcctgtggagccagactcctcctcgggaaccggaaaggcgggccagcagcctgcaagaaaaagattgaattttggtcagactggagacgcagactcagtacctgacccccagcctctcggacagccaccagcagccccctctggtctgggaactaatacgatggctacaggcagtggcgcaccaatggcagacaataacgagggcgccgacggagtgggtaattcctcgggaaattggcattgcgattccacatggatgggcgacagagtcatcaccaccagcacccgaacctgggccctgcccacctacaacagccacctctacaaacaaatttccagccaatcaggagcctcgaacgacaatcactactttggctacagcaccccttgggggtattttgacttcaacagattccactgccacttttcaccacgtgactggcaaagactcatcaacaacaactggggattccgacccaagagactcaacttcaagctctttaacattcaagtcaaagaggtcacgcagaatgacggtacgacgacgattgccaataaccttaccagcacggttcaggtgtttactgactcggagtaccagctcccgtacgtcctcggctcggcgcatcaaggatgcctcccgccgttcccagcagacgtcttcatggtgccacagtatggatacctcaccctgaacaacgggagtcaggcagtaggacgctcttcattttactgcctggagtactttccttctcagatgctgcgtaccggaaacaactttaccttcagctacacttttgaggacgttcctttccacagcagctacgctcacagccagagtctggaccgtctcatgaatcctctcatcgaccagtacctgtattacttgagcagaacaaacactccaagtggaaccaccacgcagtcaaggcttcagttttctcaggccggagcgagtgacattcgggaccagtctaggaactggcttcctggaccctgttaccgccagcagcgagtatcaaagacatctgcggataacaacaacagtgaatactcgtggactggagctaccaagtaccacctcaatggcagagactctctggtgaatccgggcccggccatggcaagccacaaggacgatgaagaaaagttttttcctcagagcggggttctcatctttgggaagcaaggctcagagaaaacaaatgtggacattgaaaaggtcatgattacagacgaagaggaaatcaggacaaccaatcccgtggctacggagcagtatggttctgtatctaccaacctccagagaggcaacagacaagcagctaccgcagatgtcaacacacaaggcgttcttccaggcatggtctggcaggacagagatgtgtaccttcaggggcccatctgggcaaagattccacacacggacggacattttcacccctctcccctcatgggtggattcggacttaaacaccctcctccacagattctcatcaagaacaccccggtacctgcgaatccttcgaccaccttcagtgcggcaaagtttgcttccttcatcacacagtactccacgggacaggtcagcgtggagatcgagtgggagctgcagaaggaaaacagcaaacgctggaatcccgaaattcagtacacttccaactacaacaagtctgttaatgtggactttactgtggacactaatggcgtgtattcagagcctcgccccattggcaccagatacctgactcgtaatctgtaa

SEQ ID NO: 12945 - DNA, 2208 bp, Artificial Sequence
  source: /note="Description of Artificial Sequence: Synthetic polynucleotide"
atggctgccgatggttatcttccagattggctcgaggacactctctctgaaggaataagacagtggtggaagctcaaacctggcccaccaccaccaaagcccgcagagcggcataaggacgacagcaggggtcttgtgcttcctgggtacaagtacctcggacccttcaacggactcgacaagggagagccggtcaacgaggcagacgccgcggccctcgagcacgacaaagcctacgaccggcagctcgacagcggagacaacccgtacctcaagtacaaccacgccgacgcggagtttcaggagcgccttaaagaagatacgtcttttgggggcaacctcggacgagcagtcttccaggcgaaaaagagggttcttgaacctctgggcctggttgaggaacctgttaagacggctccgggaaaaaagaggccggtagagcactctcctgtggagccagactcctcctcgggaaccggaaaggcgggccagcagcctgcaagaaaaagattgaattttggtcagactggagacgcagactcagtacctgacccccagcctctcggacagccaccagcagccccctctggtctgggaactaatacgatggctacaggcagtggcgcaccaatggcagacaataacgagggcgccgacggagtgggtaattcctcgggaaattggcattgcgattccacatggatgggcgacagagtcatcaccaccagcacccgaacctgggccctgcccacctacaacaaccacctctacaaacaaatttccagccaatcaggagcctcgaacgacaatcactactttggctacagcaccccttgggggtattttgacttcaacagattccactgccacttttcaccacgtgactggcaaagactcatcaacaacaactggggattccgacccaagagactcaacttcaagctctttaacattcaagtcaaagaggtcacgcagaatgacggtacgacgacgattgccaataaccttaccagcacggttcaggtgtttactgactcggagtaccagctcccgtacgtcctcggctcggcgcatcaaggatgcctcccgccgttcccagcagacgtcttcatggtgccacagtatggatacctcaccctgaacaacgggagtcaggcagtaggacgctcttcattttactgcctggagtactttccttctcagatgctgcgtaccggaaacaactttaccttcagctacacttttgaggacgttcctttccacagcagctacgctcacagccagagtctggaccgtctcatgaatcctctcatcgaccagtacctgtattacttgagcagaacaaacactccaagtggaaccaccacgcagtcaaggcttcagttttctcaggccggagcgagtgacattcgggaccagtctaggaactggcttcctggaccctgttaccgccagcagcgagtatcaaagacatctgcggataacaacaacagtgaatactcgtggactggagctaccaagtaccacctcaatggcagagactctctggtgaatccgggcccggccatggcaagccacaaggacgatgaagaaaagttttttcctcagagcggggttctcatctttgggaagcaaggctcagagaaaacaaatgtggacattgaaaaggtcatgattacagacgaagaggaaatcaggacaaccaatcccgtggctacggagcagtatggttctgtatctaccaacctccagagaggcaacagacaagcagctaccgcagatgtcaacacacaaggcgttcttccaggcatggtctggcaggacagagatgtgtaccttcaggggcccatctgggcaaagattccacacacggacggacattttcacccctctcccctcatgggtggattcggacttaaacgccctcctccacagattctcatcaagaacaccccggtacctgcgaatccttcgaccaccttcagtgcggcaaagtttgcttccttcatcacacagtactccacgggacaggtcagcgtggagatcgagtgggagctgcagaaggaaaacagcaaacgctggaatcccgaaattcagtacacttccaactacaacaagtctgttaatgtggactttactgtggacactaatggcgtgtattcagagcctcgccccattggcaccagatacctgactcgtaatctgtaa

SEQ ID NO: 12946 - DNA, 2208 bp, Artificial Sequence
  source: /note="Description of Artificial Sequence: Synthetic polynucleotide"
atggctgccgatggttatcttccagattggctcgaggacactctctctgaaggaataagacagtggtggaagctcaaacctggcccaccaccaccaaagcccgcagagcggcataaggacgacagcaggggtcttgtgcttcctgggtacaagtacctcggacccttcaacggactcgacaagggagagccggtcaacgaggcagacgccgcggccctcgagcacgacaaagcctacgaccggcagctcgacagcggagacaacccgtacctcaagtacaaccacgccgacgcggagtttcaggagcgccttaaagaagatacgtcttttgggggcaacctcggacgagcagtcttccaggcgaaaaagagggttcttgaacctctgggcctggttgaggaacctgttaagacggctccgggaaaaaagaggccggtagagcactctcctgtggagccagactcctcctcgggaaccggaaaggcgggccagcagcctgcaagaaaaagattgaattttggtcagactggagacgcagactcagtacctgacccccagcctctcggacagccaccagcagccccctctggtctgggaactaatacgatggctacaggcagtggcgcaccaatggcagacaataacgagggcgccgacggagtgggtaattcctcgggaaattggcattgcgattccacatggatgggcgacagagtcatcaccaccagcacccgaacctgggccctgcccacctacaacaaccacctctacaaacaaatttccagccaatcaggagcctcgaacgacaatcactactttggctacagcaccccttgggggtattttgacttcaacagattccactgccacttttcaccacgtgactggcaaagactcatcaacaacaactggggattccgacccaagagactcaacttcaagctctttaacattcaagtcaaagaggtcacgcagaatgacggtacgacgacgattgccaataaccttaccagcacggttcaggtgtttactgactcggagtaccggctcccgtacgtcctcggctcggcgcatcaaggatgcctcccgccgttcccagcagacgtcttcatggtgccacagtatggatacctcaccctgaacaacgggagtcaggcagtaggacgctcttcattttactgcctggagtactttccttctcagatgctgcgtaccggaaacaactttaccttcagctacacttttgaggacgttcctttccacagcagctacgctcacagccagagtctggaccgtctcatgaatcctctcatcgaccagtacctgtattacttgagcagaacaaacactccaagtggaaccaccacgcagtcaaggcttcagttttctcaggccggagcgagtgacattcgggaccagtctaggaactggcttcctggaccctgttaccgccagcagcgagtatcaaagacatctgcggataacaacaacagtgaatactcgtggactggagctaccaagtaccacctcaatggcagagactctctggtgaatccgggcccggccatggcaagccacaaggacgatgaagaaaagttttttcctcagagcggggttctcatctttgggaagcaaggctcagagaaaacaaatgtggacattgaaaaggtcatgattacagacgaagaggaaatcaggacaaccaatcccgtggctacggagcagtatggttctgtatctaccaacctccagagaggcaacagacaagcagctaccgcagatgtcaacacacaaggcgttcttccaggcatggtctggcaggacagagatgtgtaccttcaggggcccatctgggcaaagattccacacacggacggacattttcacccctctcccctcatgggtggattcggacttaaacaccctcctccacagattctcatcaagaacaccccggtacctgcgaatccttcgaccaccttcagtgcggcaaagtttgcttccttcatcacacagtactccacgggacaggtcagcgtggagatcgagtgggagctgcagaaggaaaacagcaaacgctggaatcccgaaattcagtacacttccaactacaacaagtctgttaatgtggactttactgtggacactaatggcgtgtattcagagcctcgccccattggcaccagatacctgactcgtaatctgtaa

SEQ ID NO: 12947 - DNA, 2208 bp, Artificial Sequence
  source: /note="Description of Artificial Sequence: Synthetic polynucleotide"
atggctgccgatggttatcttccagattggctcgaggacactctctctgaaggaataagacagtggtggaagctcaaacctggcccaccaccaccaaagcccgcagagcggcataaggacgacagcaggggtcttgtgcttcctgggtacaagtacctcggacccttcaacggactcgacaagggagagccggtcaacgaggcagacgccgcggccctcgagcacgacaaagcctacgaccggcagctcgacagcggagacaacccgtacctcaagtacaaccacgccgacgcggagtttcaggagcgccttaaagaagatacgtcttttgggggcaacctcggacgagcagtcttccaggcgaaaaagagggttcttgaacctctgggcctggttgaggaacctgttaagacggctccgggaaaaaagaggccggtagagcactctcctgtggagccagactcctcctcgggaaccggaaaggcgggccagcagcctgcaagaaaaagattgaattttggtcagactggagacgcagactcagtacctgacccccagcctctcggacagccaccagcagccccctctggtctgggaactaatacgatggctacaggcagtggcgcaccaatggcagacaataacgagggcgccgacggagtgggtaattcctcgggaaattggcattgcgattccacatggatgggcgacagagtcatcaccaccagcacccgaacctgggccctgcccacctacaacaaccacctctacaaacaaatttccagccaatcaggagcctcgaacgacaatcactactttggctacagcaccccttgggggtattttgacttcaacagattccactgccacttttcaccacgtgactggcaaagactcatcaacaacaactggggattccgacccaagagactcaacttcaagctctttaacattcaagtcaaagaggtcacgcagaatgacggtacgacgacgattgccaataaccttaccagcacggttcgggtgtttactgactcggagtaccagctcccgtacgtcctcggctcggcgcatcaaggatgcctcccgccgttcccagcagacgtcttcatggtgccacagtatggatacctcaccctgaacaacgggagtcaggcagtaggacgctcttcattttactgcctggagtactttccttctcagatgctgcgtaccggaaacaactttaccttcagctacacttttgaggacgttcctttccacagcagctacgctcacagccagagtctggaccgtctcatgaatcctctcatcgaccagtacctgtattacttgagcagaacaaacactccaagtggaaccaccacgcagtcaaggcttcagttttctcaggccggagcgagtgacattcgggaccagtctaggaactggcttcctggaccctgttaccgccagcagcgagtatcaaagacatctgcggataacaacaacagtgaatactcgtggactggagctaccaagtaccacctcaatggcagagactctctggtgaatccgggcccggccatggcaagccacaaggacgatgaagaaaagttttttcctcagagcggggttctcatctttgggaagcaaggctcagagaaaacaaatgtggacattgaaaaggtcatgattacagacgaagaggaaatcaggacaaccaatcccgtggctacggagcagtatggttctgtatctaccaacctccagagaggcaacagacaagcagctaccgcagatgtcaacacacaaggcgttcttccaggcatggtctggcaggacagagatgtgtaccttcaggggcccatctgggcaaagattccacacacggacggacattttcacccctctcccctcatgggtggattcggacttaaacaccctcctccacagattctcatcaagaacaccccggtacctgcgaatccttcgaccaccttcagtgcggcaaagtttgcttccttcatcacacagtactccacgggacaggtcagcgtggagatcgagtgggagctgcagaaggaaaacagcaaacgctggaatcccgaaattcagtacacttccaactacaacaagtctgttaatgtggactttactgtggacactaatggcgtgtattcagagcctcgccccattggcaccagatacctgactcgtaatctgtaa

SEQ ID NO: 12948 - DNA, 2208 bp, Artificial Sequence
  source: /note="Description of Artificial Sequence: Synthetic polynucleotide"
atggctgccgatggttatcttccagattggctcgaggacactctctctgaaggaataagacagtggtggaagctcaaacctggcccaccaccaccaaagcccgcagagcggcatagggacgacagcaggggtcttgtgcttcctgggtacaagtacctcggacccttcaacggactcgacaagggagagccggtcaacgaggcagacgccgcggccctcgagcacgacaaagcctacgaccggcagctcgacagcggagacaacccgtacctcaagtacaaccacgccgacgcggagtttcaggagcgccttaaagaagatacgtcttttgggggcaacctcggacgagcagtcttccaggcgaaaaagagggttcttgaacctctgggcctggttgaggaacctgttaagacggctccgggaaaaaagaggccggtagagcactctcctgtggagccagactcctcctcgggaaccggaaaggcgggccagcagcctgcaagaaaaagattgaattttggtcagactggagacgcagactcagtacctgacccccagcctctcggacagccaccagcagccctctctggtctgggaactaatacgatggctacaggcagtggcgcaccaatggcagacaataacgagggcgccgacggagtgggtaattcctcgggaaattggcattgcgattccacatggatgggcgacagagtcatcaccaccagcacccgaacctgggccctgcccacctacaacaaccacctctacaaacaaatttccagccaatcaggagcctcgaacggcaatcactactttggctacagcaccccttgggggtattttgacttcaacagattccactgccacttttcaccacgtgactggcaaagactcatcaacaacaactggggattccgacccaagagactcaacttcaagctctttaacattcaagtcaaagaggtcacgcagaatgacggtacgacgacgattgccaataaccttaccagcacggttcaggtgtttactgactcggagtaccagctcccgtacgtcctcggctcggcgcatcaaggatgcctcccgccgttcccagcagacgtcttcatggtgccacagtatggatacctcaccctgaacaacgggagtcaggcagtaggacgctcttcattttactgcctggagtactttccttctcagatgctgcgtaccggaaacaactttaccttcagctacacttttgaggacgttcctttccacagcagctacgctcacagccagagtctggaccgtctcatgaatcctctcatcgaccagtacctgtattacttgagcagaacaaacactccaagtggaaccaccacgcagtcaaggcttcagttttctcaggccggagcgagtgacattcgggaccagtctaggaactggcttcctggaccctgttaccgccagcagcgagtatcaaagacatctgcggataacaacaacagtgaatactcgtggactggagctaccaagtaccacctcaatggcagagactctctggtgaatccgggcccggccatggcaagccacaaggacgatgaagaaaagttttttcctcagagcggggttctcatctttgggaagcaaggctcagagaaaacaaatgtggacattgaaaaggtcatgattacagacgaagaggaaatcaggacaaccaatcccgtggctacggagcagtatggttctgtatctaccaacctccagaggggcaacagacaagcagctaccgcagatgtcaacacacaaggcgttcttccaggcatggtctggcaggacagagatgtgtaccttcaggggcccatctgggcaaagattccacacacggacggacattttcacccctctcccctcatgggtggattcggacttaaacaccctcctccacagattctcatcaagaacaccccggtacctgcgaatccttcgaccaccttcagtgcggcaaagtttgcttccttcatcacacagtactccacgggacaggtcagcgtggagatcgagtgggagctgcagaaggaaaacagcaaacgctggaatcccgaaattcagtacacttccaactacaacaagtctgttaatgtggactttactgtggacactaatggcgtgtattcagagcctcgccccattggcaccagatacctgactcgtaatctgtaa

SEQ ID NO: 12949 - DNA, 2208 bp, Artificial Sequence
  source: /note="Description of Artificial Sequence: Synthetic polynucleotide"
atggctgccgatggttatcttccagattggctcgaggacactctctctgaaggaataagacagtggtggaagctcaaacctggcccaccaccaccaaagcccgcagagcggcatagggacgacagcaggggtcttgtgcttcctgggtacaagtacctcggacccttcaacggactcgacaagggagagccggtcaacgaggcagacgccgcggccctcgagcacgacaaagcctacgaccggcagctcgacagcggagacaacccgtacctcaagtacaaccacgccgacgcggagtttcaggagcgccttaaagaagatacgtcttttgggggcaacctcggacgagcagtcttccaggcgaaaaagagggttcttgaacctctgggcctggttggggaacctgttaagacggctccgggaaaaaagaggccggtagagcactctcctgtggagccagactcctcctcgggaaccggaaaggcgggccagcagcctgcaagaaaaagattgaattttggtcagactggagacgcagactcagtacctgacccccagcctctcggacagccaccagcagccccctctggtctgggaactaatacgatggctacaggcagtggcgcaccaatggcagacaataacgagggcgccgacggagtgggtaattcctcgggaaattggcattgcgattccacatggatgggcgacagagtcatcaccaccagcacccgaacctgggccctgcccacctacaacaaccacctctacaaacaaatttccagccaatcaggagcctcgaacggcaatcactactttggctacagcaccccttgggggtattttgacttcaacagattccactgccacttttcaccacgtgactggcaaagactcatcaacaacaactggggattccgacccaagagactcaacttcaagctctttaacattcaagtcaaagaggtcacgcagaatgacggtacgacgacgattgccaataaccttaccagcacggttcaggtgtttactgactcggagtaccagctcccgtacgtcctcggctcggcgcatcaaggatgcctcccgccgttcccagcagacgtcttcatggtgccacagtatggatacctcaccctgaacaacgggagtcaggcagtaggacgctcttcattttactgcctggagtactttccttctcagatgctgcgtaccggaaacaactttaccttcagctacacttttgaggacgttcctttccacagcagctacgctcacagccagagtctggaccgtctcatgaatcctctcatcgaccagtacctgtattacttgagcagaacaaacactccaagtggaaccaccacgcagtcaaggcttcagttttctcaggccggagcgagtgacattcgggaccagtctaggaactggcttcctggaccctgttaccgccagcagcgagtatcaaagacatctgcggataacaacaacagtgaatactcgtggactggagctaccaagtaccacctcaatggcagagactctctggtgaatccgggcccggccatggcaagccacaaggacgatgaagaaaagttttttcctcagagcggggttctcatctttgggaagcaaggctcagagaaaacaaatgtggacattgaaaaggtcatgattacagacgaagaggaaatcaggacaaccaatcccgtggctacggagcagtatggttctgtatctaccaacctccagaggggcaacagacaagcagctaccgcagatgtcaacacacaaggcgttcttccaggcatggtctggcaggacagagatgtgtaccttcaggggcccatctgggcaaagattccacacacggacggacattttcacccctctcccctcatgggtggattcggacttaaacaccctcctccacagattctcatcaagaacaccccggtacctgcgaatccttcgaccaccttcagtgcggcaaagtttgcttccttcatcacacagtactccacgggacaggtcagcgtggagatcgagtgggagctgcagaaggaaaacagcaaacgctggaatcccgaaattcagtacacttccaactacaacaagtctgttaatgtggactttactgtggacactaatggcgtgtattcagagcctcgccccattggcaccagatacctgactcgtaatctgtaa

SEQ ID NO: 12950 - DNA, 2208 bp, Artificial Sequence
  source: /note="Description of Artificial Sequence: Synthetic polynucleotide"
atggctgccgatggttatcttccagattggctcgaggacactctctctgaaggaataagacagtggtggaagctcaaacctggcccaccaccaccaaagcccgcagagcggcatagggacgacagcaggggtcttgtgcttcctgggtacaagtacctcggacccttcaacggactcgacaagggagagccggtcaacgaggcagacgccgcggccctcgagcacgacaaagcctacgaccggcagctcgacagcggagacaacccgtacctcaagtacaaccacgccgacgcggagtttcaggagcgccttaaagaagatacgtcttttgggggcaacctcggacgagcagtcttccaggcgaaaaagagggttcttgaacctctgggcctggttgaggaacctgttaagacggctccgggaaaaaagaggccggtagagcactctcctgtggagccagactcctcctcgggaaccggaaaggcgggccagcagcctgcaagaaaaagattgaattttggtcagactggagacgcagactcagtacctgacccccagcctctcggacagccaccagcagccccctctggtctgggaactaatacgatggctacaggcagtggcgcaccaatggcagacaataacgagggcgccgacggagtgggtaattcctcgggaaattggcattacgattccgcatggatgggcgacagagtcatcaccaccagcacccgaacctgggccctgcccacctacaacaaccacctctacaaacaaatttccagccaatcaggagcctcgaacggcaatcactactttggctacagcaccccttgggggtattttgacttcaacagattccactgccacttttcaccacgtgactggcaaagactcatcaacaacaactggggattccgacccaagagactcaacttcaagctctttaacattcaagtcaaagaggtcacgcagaatgacggtacgacgacgattgccaataaccttaccagcacggttcaggtgtttactgactcggagtaccagctcccgtacgtcctcggctcggcgcatcaaggatgcctcccgccgttcccagcagacgtcttcatggtgccacagtatggatacctcaccctgaacaacgggagtcaggcagtaggacgctcttcattttactgcctggagtactttccttctcagatgctgcgtaccggaaacaactttaccttcagctacacttttgaggacgttcctttccacagcagctacgctcacagccagagtctggaccgtctcatgaatcctctcatcgaccagtacctgtattacttgagcagaacaaacactccaagtggaaccaccacgcagtcaaggcttcagttttctcaggccggagcgagtgacattcgggaccagtctaggaactggcttcctggaccctgttaccgccagcagcgagtatcaaagacatctgcggataacaacaacagtgaatactcgtggactggagctaccaagtaccacctcaatggcagagactctctggtgaatccgggcccggccatggcaagccacaaggacgatgaagaaaagttttttcctcagagcggggttctcatctttgggaagcaaggctcagagaaaacaaatgtggacattgaaaaggtcatgattacagacgaagaggaaatcaggacaaccaatcccgtggctacggagcagtatggttctgtatctaccaacctccagaggggcaacagacaagcagctaccgcagatgtcaacacacaaggcgttcttccaggcatggtctggcaggacagagatgtgtaccttcaggggcccatctgggcaaagattccacacacggacggacattttcacccctctcccctcatgggtggattcggacttaaacaccctcctccacagattctcatcaagaacaccccggtacctgcgaatccttcgaccaccttcagtgcggcaaagtttgcttccttcatcacacagtactccacgggacaggtcagcgtggagatcgagtgggagctgcagaaggaaaacagcaaacgctggaatcccgaaattcagtacacttccaactacaacaagtctgttaatgtggactttactgtggacactaatggcgtgtattcagagcctcgccccattggcaccagatacctgactcgtaatctgtaa

SEQ ID NO: 12951 - DNA, 2208 bp, Artificial Sequence
  source: /note="Description of Artificial Sequence: Synthetic polynucleotide"
atggctgccgatggttatcttccagattggctcgaggacactctctctgaaggaataagacagtggtggaagctcaaacctggcccaccaccaccaaagcccgcagagcggcatagggacgacagcaggggtcttgtgcttcctgggtacaagtacctcggacccttcaacggactcgacaagggagagccggtcaacgaggcagacgccgcggccctcgagcacgacaaagcctacgaccggcagctcgacagcggagacaacccgtacctcaagtacaaccacgccgacgcggagtttcaggagcgccttaaagaagatacgtcttttgggggcaacctcggacgagcagtcttccaggcgaaaaagagggttcttgaacctctgggcctggttgaggaacctgttaagacggctccgggaaaaaagaggccggtagagcactctcctgtggagccagactcctcctcgggaaccggaaaggcgggccagcagcctgcaagaaaaagattgaattttggtcagactggagacgcagactcagtacctgacccccagcctctcggacagccaccagcagccccctctggtctgggaactaatacgatggctacaggcagtggcgcaccaatggcagacaataacgagggcgccgacggagtgggtaattcctcgggaaattggcattgcgattccacatggatgggcgacagagtcatcaccaccagcacccgaacctgggccctgcccacctacaacaaccacctctacaaacaaatttccagccaatcaggagcctcgaacggcaatcactactttggctacagcaccccttgggggtattttgacttcaacagattccactgccacttttcaccacgtgactggcaaagactcatcaacaacaactggggattccgacccaagagactcaacttcaagctctttaacattcaagtcaaagaggtcacgcagaatgacggtacgacgacgattgccaataaccttaccagcacggttcaggtgtttactgactcggagtaccagctcccgtacgtcctcggctcggcgcatcaaggatgcctcccgccgttcccagcagacgtcttcatggtgccacagtatggatacctcaccctgaacaacgggagtcaggcagtaggacgctcttcattttactgcctggagtactttccttctcagatgctgcgtaccggaaacaactttaccttcagctacacttttgaggacgttcctttccacagcagctacgctcacagccagagtctggaccgtctcatgaatcctctcatcgaccagtacctgtattacttgagcagaacaaacactccaagtggaaccaccacgcagtcaaggcttcagttttctcaggccggagcgagtgacattcgggaccagtctaggaactggcttcctggaccctgttaccgccagcagcgagtatcaaagacatctgcggataacaacaacagtgaatactcgtggactggagctaccaagtaccacctcaatggcagagactctctggtgaatccgggcccggccatggcaagccacaaggacgatgaagaaaagttttttcctcagagcggggttctcatctttgggaagcaaggctcagagaaaacaaatgtggacattgaaaaggtcatgattacagacgaagaggaaatcaggacaaccaatcccgtggctacggagcagtatggttctgtatctaccaacctccagaggggcaacagacaagcagctaccgcagatgtcaacacacaaggcgttcttccaggcatggtctggcaggacagagatgtgtaccttcaggggcccatctgggcaaagattccacacacggacggacattttcacccctctcccctcatgggtggattcggacttaaacaccctcctccacagattctcatcaagaacaccccggtacctgcgaatccttcgaccaccttcagtgcggcaaagtttgcttccttcatcgcacagtactccacgggacaggtcagcgtggagatcgagtgggagctgcagaaggaaaacagcaaacgctggaatcccgaaattcagtacacttccaactacaacaagtctgttaatgtggactttactgtggacactaatggcgtgtattcagagcctcgccccattggcaccagatacctgactcgtaatctgtaa

SEQ ID NO: 12952 - DNA, 2208 bp, Artificial Sequence
  source: /note="Description of Artificial Sequence: Synthetic polynucleotide"
atggctgccgatggttatcttccagattggctcgaggacactctctctgaaggaataagacagtggtggaagctcaaacctggcccaccaccaccaaagcccgcagagcggcatagggacgacagcaggggtcttgtgcttcctgggtacaagtacctcggacccttcaacggactcgacaagggagagccggtcaacgaggcagacgccgcggccctcgagcacgacaaagcctacgaccggcagctcgacagcggagacaacccgtacctcaagtacaaccacgccgacgcggagtttcaggagcgccttaaagaagatacgtcttttgggggcaacctcggacgagcagtcttccaggcgaaaaagagggttcttgaacctctgggcctggttgaggaacctgttaagacggctccgggaaaaaagaggccggtagagcactctcctgtggagccagactcctcctcgggaaccggaaaggcgggccagcagcctgcaagaaaaagattgaattttggtcagactggagacgcagactcagtacctgacccccagcctctcggacagccaccagcagccccctctggtctgggaactaatacgatggctacaggcagtggcgcaccaatggcagacaataacgagggcgccgacggagtgggtaattcctcgggaaattggcattgcgattccacatggatgggcgacagagtcatcaccaccagcacccgaacctgggccctgcccacctacaacaaccacctctacaaacaaatttccagccaatcaggagcctcgaacggcaatcactactttggctacagcaccccttgggggtattttgacttcaacagattccactgccacttttcaccacgtgactggcaaagactcatcaacaacaactggggattccgacccaagagactcaacttcaagctctttaacattcaagtcaaagaggtcacgcagaatgacggtacgacgacgattgccaataaccttaccagcacggttcaggtgtttactgactcggagtaccagctcccgtacgtcctcggctcggcgcatcaaggatgcctcccgccgttcccagcagacgtcttcatggtgccacagtatggatacctcaccctgaacaacgggagtcaggcagtaggacgctcttcattttactgcctggagtactttccttctcagatgctgcgtaccggaaacaactttaccttcagctacacttttgaggacgttcctttccacagcagctacgctcacagccagagtctggaccgtctcatgaatcctctcatcgaccagtacccgtattacttgagcagaacaaacactccaagtggaaccaccacgcagtcaaggcttcagttttctcaggccggagcgagtgacattcgggaccagtctaggaactggcttcctggaccctgttaccgccagcagcgagtatcaaagacatctgcggataacaacaacagtgaatactcgtggactggagctaccaagtaccacctcaatggcagagactctctggtgaatccgggcccggccatggcaagccacaaggacgatgaagaaaagttttttcctcagagcggggttctcatctttgggaagcaaggctcagagaaaacaaatgtggacattgaaaaggtcatgattacagacgaagaggaaatcaggacaaccaatcccgtggctacggagcagtatggttctgtatctaccaacctccagaggggcaacagacaagcagctaccgcagatgtcaacacacaaggcgttcttccaggcatggtctggcaggacagagatgtgtaccttcaggggcccatctgggcaaagattccacacacggacggacattttcacccctctcccctcatgggtggattcggacttaaacaccctcctccacagattctcatcaagaacaccccggtacctgcgaatccttcgaccaccttcagtgcggcaaagtttgcttccttcatcacacagtactccacgggacaggtcagcgtggagatcgagtgggagctgcagaaggaaaacagcaaacgctggaatcccgaaattcagtacacttccaactacaacaagtctgttaatgtggactttactgtggacactaatggcgtgtattcagagcctcgccccattggcaccagatacctgactcgtaatctgtaa

SEQ ID NO: 12953 - DNA, 2208 bp, Artificial Sequence
  source: /note="Description of Artificial Sequence: Synthetic polynucleotide"
atggctgccgatggttatcttccagattggctcgaggacactctctctgaaggaataagacagtggtggaagctcaaacctggcccaccaccaccaaagcccgcagagcggcatagggacgacagcaggggtcttgtgcttcctgggtacaagtacctcggacccttcaacggactcgacaagggagagccggtcaacgaggcagacgccgcggccctcgagcacgacaaagcctacgaccggcagctcgacagcggagacaacccgtacctcaagtacaaccacgccgacgcggagtttcaggagcgccttaaagaagatacgtcttttgggggcaacctcggacgagcagtcttccaggcgaaaaagagggttcttgaacctctgggcctggttgaggaacctgttaagacggctccgggaaaaaagaggccggtagagcactctcctgtggagccagactcctcctcgggaaccggaaaggcgggccagcagcctgcaagaaaaagattgaattttggtcagactggagacgcagactcagtacctgacccccagcctctcggacagccaccagcagccccctctggtctgggaactaatacgatggctacaggcagtggcgcaccaatggcagacaataacgagggcgccgacggagtgggtaattcctcgggaaattggcattgcgattccacatggatgggcgacagagtcatcaccaccagcacccgaacctgggccctgcccacctacaacaaccacctctacaaacaaatttccagccaatcaggagcctcgaacggcaatcactactttggctacagcaccccttgggggtattttgacttcaacagattccactgccacttttcaccacgtgaccggcaaagactcatcaacaacaactggggattccgacccaagagactcaacttcaagctctttaacattcaagtcaaagaggtcacgcagaatgacggtacgacgacgattgccaataaccttaccagcacggttcaggtgtttactgactcggagtaccagctcccgtacgtcctcggctcggcgcatcaaggatgcctcccgccgttcccagcagacgtcttcatggtgccacagtatggatacctcaccctgaacaacgggagtcaggcagtaggacgctcttcattttactgcctggagtactttccttctcagatgctgcgtaccggaaacaactttaccttcagctacacttttgaggacgttcctttccacagcagctacgctcacagccagagtctggaccgtctcatgaatcctctcatcgaccagtacctgtattacttgagcagaacaaacactccaagtggaaccaccacgcagtcaaggcttcagttttctcaggccggagcgagtgacattcgggaccagtctaggaactggcttcctggaccctgttaccgccagcagcgagtatcaaagacatctgcggataacaacaacagtgaatactcgtggactggagctaccaagtaccacctcaatggcagagactctctggtgaatccgggcccggccatggcaagccacaaggacgatgaagaaaagttttttcctcagagcggggttctcatctttgggaagcaaggctcagagaaaacaaatgtggacattgaaaaggtcatgattacagacgaagaggaaatcaggacaaccaatcccgtggctacggagcagtatggttctgtatctaccaacctccagaggggcaacagacaagcagctaccgcagatgtcaacacacaaggcgttcttccaggcatggtctggcaggacagagatgtgtaccttcaggggcccatctgggcaaagattccacacacggacggacattttcacccctctcccctcatgggtggattcggacttaaacaccctcctccacagattctcatcaagaacaccccggtacctgcgaatccttcgaccaccttcagtgcggcaaagtttgcttccttcatcacacagtactccacgggacaggtcagcgtggagatcgagtgggagctgcagaaggaaaacagcaaacgctggaatcccgaaattcagtacacttccaactacaacaagtctgttaatgtggactttactgtggacactaatggcgtgtattcagagcctcgccccattggcaccagatacctgactcgtaatctgtaa

SEQ ID NO: 12954 - DNA, 2208 bp, Artificial Sequence
  source: /note="Description of Artificial Sequence: Synthetic polynucleotide"
atggctgccgatggttatcttccagattggctcgaggacactctctctgaaggaataagacagtggtggaagctcaaacctggcccaccaccaccaaagcccgcagagcggcatagggacgacagcaggggtcttgtgcttcctgggtacaagtacctcggacccttcaacggactcgacaagggagagccggtcaacgaggcagacgccgcggccctcgagcacgacaaagcctacgaccggcagctcgacagcggagacaacccgtacctcaagtacaaccacgccgacgcggagtttcaggagcgccttaaagaagatacgtcttttgggggcaacctcggacgagcagtcttccaggcgaaaaagagggttcttgaacctctgggcctggttgaggaacctgttaagacggctccgggaaaaaagaggccggtagagcactctcctgtggagccagactcctcctcgggaaccggaaaggcgggccagcagcctgcaagaaaaagattgaattttggtcagactggagacgcagactcagtacctgacccccagcctctcggacagccaccagcagccccctctggtctgggaactaatacgatggctacaggcagtggcgcaccaatggcagacaataacgagggcgccgacggagtgggtaattcctcgggaaattggcattgcgattccacatggatgggcgacagagtcatcaccaccagcacccgaacctgggccctgcccacctacaacaaccacctctacaaacaaatttccagccaatcaggagcctcgaacggcaatcactactttggctacagcaccccttgggggtattttgacttcaacagattccactgccacttttcaccacgtgactggcaaagactcatcaacaacaactggggattccgacccaagagactcaacttcaagctctttaacattcaagtcaaagaggtcacgcagaatgacggtacgacgacgattgccaataaccttaccagcacggttcaggtgtttactgactcggagtaccagctcccgtacgtcctcggctcggcgcatcaaggatgcctcccgccgttcccagcagacgtcttcatggtgccacagtatggatacctcaccctgaacaacgggagtcaggcagtaggacgctcttcattttactgcctggagtactttccttctcagatgctgcgtaccggaaacaactttaccttcagctacacttttgaggacgttcctttccacagcagctacgctcacagccagagtctggaccgtctcatgaatcctctcatcgaccagtacctgtattacttgagcagaacaaacactccaagtggaaccaccacgcagtcaaggcttcagttttctcaggccggagcgagtgacattcgggaccagtctaggaactggcttcctggaccctgttaccgccagcagcgagtatcaaagacatctgcggataacaacaacagtgaatactcgtggactggagctaccaagtaccacctcaatggcagagactctctggtgaatccgggcccggccatggcaagccacaaggacgatgaagaaaagttttttcctcagagcggggttctcatctttgggaagcaaggctcagagaaaacaaatgtggacattgaaaaggtcatgattacagacgaagaggaaatcaggacaaccaatcccgtggctacggagcagtatggttctgtatctaccaacctccagaggggcaacagacaagcagctaccgcagatgtcaacacacaaggcgttcttccaggcatggtctggcaggacagagatgtgtaccttcaggggcccatctgggcaaagattccacacacggacggacattttcacccctctcccctcatgggtggattcggacttaaacaccctcctccacagattctcatcaagaacaccccggtacctgcgaatccttcgaccaccttcagtgcggcaaagtttgcttccttcatcacacagtactccacgggacaggtcagcgtggagatcgagtgggagctgcagaaggaaaacagcaaacgctggaatcccgaaattcagtacacttccaactacaacaagtctgttaatgtggaccttactgtggacactaatggcgtgtattcagagcctcgccccattggcaccagatacctgactcgtaatctgtaa

SEQ ID NO: 12955 - DNA, 2208 bp, Artificial Sequence
  source: /note="Description of Artificial Sequence: Synthetic polynucleotide"
atggctgccgatggttatcttccagattggctcgaggacactctctctgaaggaataagacagtggtggaagctcaaacctggcccaccaccaccaaagcccgcagagcggcatagggacgacagcaggggtcttgcgcttcctgggtacaagtacctcggacccttcaacggactcgacaagggagagccggtcaacgaggcagacgccgcggccctcgagcacgacaaagcctacgaccggcagctcgacagcggagacaacccgtacctcaagtacaaccacgccgacgcggagtttcaggagcgccttaaagaagatacgtcttttgggggcaacctcggacgagcagtcttccaggcgaaaaagagggttcttgaacctctgggcctggttgaggaacctgttaagacggctccgggaaaaaagaggccggtagagcactctcctgtggagccagactcctcctcgggaaccggaaaggcgggccagcagcctgcaagaaaaagattgaattttggtcagactggagacgcagactcagtacctgacccccagcctctcggacagccaccagcagccccctctggtctgggaactaatacgatggctacaggcagtggcgcaccaatggcagacaataacgagggcgccgacggagtgggtaattcctcgggaaattggcattgcgattccacatggatgggcgacagagtcatcaccaccagcacccgaacctgggccctgcccacctacaacaaccacctctacaaacaaatttccagccaatcaggagcctcgaacggcaatcactactttggctacagcaccccttgggggtattttgacttcaacagattccactgccacttttcaccacgtgactggcaaagactcatcaacaacaactggggattccgacccaagagactcaacttcaagctctttaacattcaagtcaaagaggtcacgcagaatgacggtacgacgacgattgccaataaccttaccagcacggttcaggtgtttactgactcggagtaccagctcccgtacgtcctcggctcggcgcatcaaggatgcctcccgccgttcccagcagacgtcttcatggtgccacagtatggatacctcaccctgaacaacgggagtcaggcagtaggacgctcttcattttactgcctggagtactttccttctcagatgctgcgtaccggaaacaactttaccttcagctacacttttgaggacgttcctttccacagcagctacgctcacagccagagtctggaccgtctcatgaatcctctcatcgaccagtacctgtattacttgagcagaacaaacactccaagtggaaccaccacgcagtcaaggcttcagttttctcaggccggagcgagtgacattcgggaccagtctaggaactggcttcctggaccctgttaccgccagcagcgagtatcaaagacatctgcggataacaacaacagtgaatactcgtggactggagctaccaagtaccacctcaatggcagagactctctggtgaatccgggcccggccatggcaagccacaaggacgatgaagaaaagttttttcctcagagcggggttctcatctttgggaagcaaggctcagagaaaacaaatgtggacattgaaaaggtcatgattacagacgaagaggaaatcaggacaaccaatcccgtggctacggagcagtatggttctgtatctaccaacctccagaggggcaacagacaagcagctaccgcagatgtcaacacacaaggcgttcttccaggcatggtctggcaggacagagatgtgtaccttcaggggcccatctgggcaaagattccacacacggacggacattttcacccctctcccctcatgggtggattcggacttaaacaccctcctccacagattctcatcaagaacaccccggtacctgcgaatccttcgaccaccttcagtgcggcaaagtttgcttccttcatcacacagtactccacgggacaggtcagcgtggagatcgagtgggagctgcagaaggaaaacagcaaacgctggaatcccgaaattcagtacacttccaactacaacaagtctgttaatgtggactttactgtggacactaatggcgtgtattcagagcctcgccccattggcaccagatacctgactcgtaatctgtaa

SEQ ID NO: 12956 - DNA, 2208 bp, Artificial Sequence
  source: /note="Description of Artificial Sequence: Synthetic polynucleotide"
atggctgccgatggttatcttccagattggctcgaggacactctctctgaaggaataagacagtggtggaagctcaaacctggcccaccaccaccaaagcccgcagagcggcatagggacgacagcaggggtcttgtgcttcctgggtacaagtacctcggacccttcaacggactcgacaagggagagccggtcaacgaggcagacgccgcggccctcgagcacgacaaagcctacgaccggcagctcgacagcggagacaacccgtacctcaagtacaaccacgccgacgcggagtttcaggagcgccttaaagaagatacgtcttttgggggcaacctcggacgagcagtcttccaggcgaaaaagagggttcttgaacctctgggcctggttgaggaacctgttaagacggctccgggaaaaaagaggccggtagagcactctcctgtggagccagactcctcctcgggaaccggaaaggcgggccagcagcctgcaagaaaaagattgaattttggtcagactggagacgcagactcagtacctgacccccagcctctcggacagccaccagcagccccctctggtctgggaactaatacgatggctacaggcagtggcgcaccaatggcagacaataacgagggcgccgacggagtgggtaattcctcgggaaattggcattgcgattccacatggatgggcgacagagtcatcaccaccagcacccgaacctgggccctgcccacctacaacaaccacctctacaaacaaatttccagccaatcaggagcctcgaacggcaatcactactttggctacagcaccccttgggggtattttgacttcaacagattccactgccacttttcaccacgtgactggcaaagactcatcaacaacaactggggattccgacccaagagactcaacttcaagctctttaacattcaagtcaaagaggtcacgcagaatgacggtacgacgacgattgccaataaccttaccagcacggttcaggtgtttactgactcggagtaccagctcccgtacgtcctcggctcggcgcatcaaggatgcctcccgccgttcccagcagacgtcttcatggtgccacagtatggatacctcaccctgaacaacgggagtcaggcagtaggacgctcttcattttactgcctggagtactttccttctcagatgctgcgtaccggaaacaactttaccttcagctacacttttgaggacgttcctttccacagcagctacgctcacagccagagtctggaccgtctcatgaatcctctcatcgaccagtacctgtattacttgagcagaacaaacactccaagtggaaccaccacgcagtcaaggcttcagttttctcaggccggagcgagtgacattcgggaccagtctaggaactggcttcctggaccctgttaccgccagcagcgagtatcaaagacatctgcggataacaacaacagtgaatactcgtggactggagctaccaagtaccacctcaatggcagagactctctggtgaatccgggcccggccatggcaagccacaaggacgatgaagaaaagttttttcctcagagcggggttctcatctttgggaagcaaggctcagagaaaacaaatgtggacattgaaaaggtcatgattacagacgaagaggaaatcaggacaaccaatcccgtggctacggagcagtatggttctgtatctaccaacctccagaggggcaacagacaagcagctaccgcagatgccaacacacaaggcgttcttccaggcatggtctggcaggacagagatgtgtaccttcaggggcccatctgggcaaagattccacacacggacggacattttcacccctctcccctcatgggtggattcggacttaaacaccctcctccacagattctcatcaagaacaccccggtacctgcgaatccttcgaccaccttcagtgcggcaaagtttgcttccttcatcacacagtactccacgggacaggtcagcgtggagatcgagtgggagctgcagaaggaaaacagcaaacgctggaatcccgaaattcagtacacttccaactacaacaagtctgttaatgtggactttactgtggacactaatggcgtgtattcagagcctcgccccattggcaccagatacctgactcgtaatctgtaa

SEQ ID NO: 12957 - DNA, 2208 bp, Artificial Sequence
  source: /note="Description of Artificial Sequence: Synthetic polynucleotide"
atggctgccgatggttatcttccagattggctcgaggacactctctctgaaggaataagacagtggtggaagctcaaacctggcccaccaccaccaaagcccgcagagcggcatagggacgacagcaggggtcttgtgcttcctgggtacaagtacctcggacccttcaacggactcgacaagggagagccggtcaacgaggcagacgccgcggccctcgagcacgacaaagcctacgaccggcagctcgacagcggagacaacccgtacctcaagtacaaccacgccgacgcggagtttcaggagcgccttaaagaagatacgtcttttgggggcaacctcggacgagcagtcttccaggcgaaaaagagggttcttgaacctctgggcctggttgaggaacctgttaagacggctccgggaaaaaagaggccggtagagcactctcctgtggagccagactcctcctcgggaaccggaaaggcgggccagcagcctgcaagaaaaagattgaattttggtcagactggagacgcagactcagtacctgacccccagcctctcggacagccaccagcagccccctctggtctgggaactaatacgatggctacaggcagtggcgcaccaatggcagacaataacgagggcgccgacggagtgggtaattcctcgggaaattggcattgcgattccacatggatgggcgacagagtcatcaccaccagcacccgaacctgggccctgcccacctacaacaaccacctctacaaacaaatttccagccaatcaggagcctcgaacggcaatcactactttggctacagcaccccttgggggtattttgacttcaacagattccactgccacttttcaccacgtgactggcaaagactcatcaacaacaactggggattccgacccaagagactcaacttcaagctctttaacattcaagtcaaagaggtcacgcagaatgacggtacgacgacgattgccaataaccttaccagcacggttcaggtgtttactgactcggagtaccagctcccgtacgtcctcggctcggcgcatcaaggatgcctcccgccgttcccagcagacgtcttcatggtgccacagtatggatacctcaccctgaacaacgggagtcaggcagtaggacgctcttcattttactgcctggagtactttccttctcagatgctgcgtaccggaaacaactttaccttcagctacacttttgaggacgttcctttccacagcagctacgctcacagccagagtctggaccgtctcatgaatcctctcatcgaccagtacctgtattacttgagcagaacaaacactccaagtggaaccaccacgcagtcaaggcttcagttttctcaggccggagcgagtgacattcgggaccagtctaggaactggcttcctggaccctgttaccgccagcagcgagtatcaaagacatctgcggataacaacaacagtgaatactcgtggactggagctaccaagtaccacctcaatggcagagactctctggtgaatccgggcccggccatggcaagccacaaggacgatgaagaaaagttttttcctcagagcggggttctcatctttgggaagcaaggctcagagaaaacaaatgtggacattgaaaaggtcatgattacagacgaaggggaaatcaggacaaccaatcccgtggctacggagcagtatggttctgtatctaccaacctccagaggggcaacagacaagcagctaccgcagatgtcaacacacaaggcgttcttccaggcatggtctggcaggacagagatgtgtaccttcaggggcccatctgggcaaagattccacacacggacggacattttcacccctctcccctcatgggtggattcggacttaaacaccctcctccacagattctcatcaagaacaccccggtacctgcgaatccttcgaccaccttcagtgcggcaaagtttgcttccttcatcacacagtactccacgggacaggtcagcgtggagatcgagtgggagctgcagaaggaaaacagcaaacgctggaatcccgaaattcagtacacttccaactacaacaagtctgttaatgtggactttactgtggacactaatggcgtgtattcagagcctcgccccattggcaccagatacctgactcgtaatctgtaa

SEQ ID NO: 12958 - DNA, 2208 bp, Artificial Sequence
  source: /note="Description of Artificial Sequence: Synthetic polynucleotide"
atggctgccgatggttatcttccagattggctcgaggacactctctctgaaggaataagacagtggtggaagctcaaacctggcccaccaccaccaaagcccgcagagcggcatagggacgacagcaggggtcttgtgcttcctgggtacaagtacctcggacccttcaacggactcgacaagggagagccggtcaacgaggcagacgccgcggccctcgagcacgacaaagcctacgaccggcagctcgacagcggagacaacccgtacctcaagtacaaccacgccgacgcggagtttcaggagcgccttaaagaagatacgtcttttgggggcaacctcggacgagcagtcttccaggcgaaaaagagggttcttgaacctctgggcctggttgaggaacctgttaagacggctccgggaaaaaagaggccggtagagcactctcctgtggagccagactcctcctcgggaaccggaaaggcgggccagcagcctgcaagaaaaagattgaattttggtcagactggagacgcagactcagtacctgacccccagcctctcggacagccaccagcagccccctctggtctgggaactaatacgatggctacaggcagtggcgcaccaatggcagacaataacgagggcgccgacggagtgggtaattcctcgggaaattggcattgcgattccacatggatgggcgacagagtcatcaccaccagcacccgaacctgggccctgcccacctacaacaaccacctctacaaacaaatttccagccaatcaggagcctcgaacggcaatcactactttggctacagcaccccttgggggtattttgacttcaacagattccactgccacttttcaccacgtgactggcaaagactcatcaacaacaactggggattccgacccaagagactcaacttcaagctctttaacattcaagtcaaagaggtcacgcagaatgacggtacgacgacgattgccaataaccttaccagcacggttcaggtgtttactgactcggagtaccagctcccgtacgtcctcggctcggcgcatcaaggatgcctcccgccgttcccagcagacgtcttcatggtgccacagtatggatacctcaccctgaacaacgggagtcaggcagtaggacgctcttcattttactgcctggagtactttccttctcagatgctgcgtaccggaaacaactttaccttcagctacacttttgaggacgttcctttccacagcagctacgctcacagccagagtctggaccgtctcatgaatcctctcatcgaccagtacctgtattacttgagcagaacaaacactccaagtggaaccaccacgcagtcaaggcttcagttttctcaggccggagcgagtgacattcgggaccagtctaggaactggcttcctggaccctgttaccgccagcagcgagtatcaaagacatctgcggataacaacaacagtgaatactcgtggactggagctaccaagtaccacctcaatggcagagactctctggtgaatccgggcccggccatggcaagccacaaggacgatgaagaaaagttttttcctcagagcggggttctcatctttgggaagcaaggctcagagaaaacaaatgtggacattgaaaaggtcatgattacagacgaagaggaaatcaggacaaccaatcccgtggctacggagcagtatggttctgtatctaccaacctccagaggggcaacagacaagcagctaccgcagatgtcaacacacaaggcgttcttccaggcatggtctggcaggacagagatgtgtaccttcaggggcccatctgggcaaagattccacacacggacggacattttcacccctctccccccatgggtggattcggacttaaacaccctcctccacagattctcatcaagaacaccccggtacctgcgaatccttcgaccaccttcagtgcggcaaagtttgcttccttcatcacacagtactccacgggacaggtcagcgtggagatcgagtgggagctgcagaaggaaaacagcaaacgctggaatcccgaaattcagtacacttccaactacaacaagtctgttaatgtggactttactgtggacactaatggcgtgtattcagagcctcgccccattggcaccagatacctgactcgtaatctgtaa

SEQ ID NO: 12959 - DNA, 2208 bp, Artificial Sequence
  source: /note="Description of Artificial Sequence: Synthetic polynucleotide"
atggctgccgatggttatcttccagattggctcgaggacactctctctgaaggaataagacagtggtggaagctcaaacctggcccaccaccaccaaagcccgcagagcggcatagggacgacagcaggggtcttgtgcttcctgggtacaagtacctcggacccttcaacggactcgacaagggagagccggtcaacgaggcagacgccgcggccctcgagcacgacaaagcctacgaccggcagctcgacagcggagacaacccgtacctcaagtacaaccacgccgacgcggagtttcaggagcgccttaaagaagatacgtcttttgggggcaacctcggacgagcagtcttccaggcgaaaaagagggttcttgaacctctgggcctggttgaggaacctgttaagacggctccgggaaaaaagaggccggtagagcactctcctgtggagccagactcctcctcgggaaccggaaaggcgggccagcagcctgcaagaaaaagattgaattttggtcagactggagacgcagactcagtacctgacccccagcctctcggacagccaccagcagccccctctggtctgggaactaatacgatggctacaggcagtggcgcaccaatggcagacaataacgagggcgccgacggagtgggtaattcctcgggaaattggcattgcgattccacatggatgggcgacagagtcatcaccaccagcacccgaacctgggccctgcccacctacaacaaccacctctacaaacaaatttccagccaatcaggagcctcgaacggcaatcactactttggctacagcaccccttgggggtattttgacttcaacagattccactgccacttttcaccacgtgactggcaaagactcatcaacaacaactggggattccgacccaagagactcaacttcaagctctttaacattcaagtcaaagaggtcacgcagaatgacggtacgacgacgattgccaataaccttaccagcacggttcaggtgtttactgactcggagtaccagctcccgtacgtcctcggctcggcgcatcaaggatgcctcccgccgttcccagcagacgtcttcatggtgccacagtatggatacctcaccctgaacaacgggagtcaggcagtaggacgctcttcattttactgcctggagtactttccttctcagatgctgcgtaccggaaacaactttaccttcagctacacttttgaggacgttcctttccacagcagctacgctcacagccagagtctggaccgtctcatgaatcctctcatcgaccagtacctgtattacttgagcagaacaaacactccaagtggaaccaccacgcagtcaaggcttcagttttctcaggccggagcgagtgacattcgggaccagtctaggaactggcttcctggaccctgttaccgccagcagcgagtatcaaagacatctgcggataacaacaacagtgaatactcgtggactggagctaccaagtaccacctcaatggcagagactctctggtgaatccgggcccggccatggcaagccacaaggacgatgaagaaaagttttttcctcagagcggggttctcatctttgggaagcaaggctcagagaaaacaaatgtggacattgaaaaggtcatgattacagacgaagaggaaatcaggacaaccaatcccgtggctacggagcagtatggttctgtatctaccaacctccagaggggcaacagacaagcagctaccgcagatgtcaacacacaaggcgttcttccaggcatggtctggcaggacagagatgtgtaccttcaggggcccatctgggcaaagattccacacacggacggacattttcacccctctcccctcatgggtggattcggacttaaacaccctcctccacagattctcatcaagaacaccccggtacctgcgaatccttcgaccaccttcagtgcggcaaagtttgcttccttcatcacacagtactccacgggacaggtcagcgtggagatcgagtgggagctgcagaaggaaaacagcaaacgctggaatcccgaaattcagtacacttccgactacaacaagtctgttaatgtggactttactgtggacactaatggcgtgtattcagagcctcgccccattggcaccagatacctgactcgtaatctgtaa

SEQ ID NO: 12960 - DNA, 2208 bp, Artificial Sequence
  source: /note="Description of Artificial Sequence: Synthetic polynucleotide"
atggctgccgatggttatcttccagattggctcgaggacactctctctgaaggaataagacagtggtggaagctcaaacctggcccaccaccaccaaagcccgcagagcggcatagggacgacagcaggggtcttgtgcttcctgggtacaagtacctcggacccttcaacggactcgacaagggagagccggtcaacgaggcagacgccgcggccctcgagcacgacaaagcctacgaccggcagctcgacagcggagacaacccgtacctcaagtacaaccacgccgacgcggagtttcaggagcgccttaaagaagatacgtcttttgggggcaacctcggacgagcagtcttccaggcgaaaaagagggttcttgaacctctgggcctggttgaggaacctgttaagacggctccgggaaaaaagaggccggtagagcactctcctgtggagccagactcctcctcgggaaccggaaaggcgggccagcagcctgcaagaaaaagattgaattttggtcagactggagacgcagactcagtacctgacccccagcctctcggacagccaccagcagccccctctggtctgggaactaatacgatggctacaggcagtggcgcaccaatggcagacaataacgagggcgccgacggagtgggtaattcctcgggaaattggcattgcgattccacatggatgggcgacagagtcatcaccaccagcacccgaacctgggccctgcccacctacaacaaccacctctacaaacaaatttccagccaatcaggagcctcgaacggcaatcactactttggctacagcaccccttgggggtattttgacttcaacagattccactgccacttttcaccacgtgactggcaaagactcatcaacaacaactggggattccgacccaagagactcaacttcaagctctttaacattcaagtcaaagaggtcacgcagaatggcggtacgacgacgattgccaataaccttaccagcacggttcaggtgtttactgactcggagtaccagctcccgtacgtcctcggctcggcgcatcaaggatgcctcccgccgttcccagcagacgtcttcatggtgccacagtatggatacctcaccctgaacaacgggagtcaggcagtaggacgctcttcattttactgcctggagtactttccttctcagatgctgcgtaccggaaacaactttaccttcagctacacttttgaggacgttcctttccacagcagctacgctcacagccagagtctggaccgtctcatgaatcctctcatcgaccagtacctgtattacttgagcagaacaaacactccaagtggaaccaccacgcagtcaaggcttcagttttctcaggccggagcgagtgacattcgggaccagtctaggaactggcttcctggaccctgttaccgccagcagcgagtatcaaagacatctgcggataacaacaacagtgaatactcgtggactggagctaccaagtaccacctcaatggcagagactctctggtgaatccgggcccggccatggcaagccacaaggacgatgaagaaaagttttttcctcagagcggggttctcatctttgggaagcaaggctcagagaaaacaaatgtggacattgaaaaggtcatgattacagacgaagaggaaatcaggacaaccaatcccgtggctacggagcagtatggttctgtatctaccaacctccagaggggcaacagacaagcagctaccgcagatgtcaacacacaaggcgttcttccaggcatggtctggcaggacagagatgtgtaccttcaggggcccatctgggcaaagattccacacacggacggacattttcacccctctcccctcatgggtggattcggacttaaacaccctcctccacagattctcatcaagaacaccccggtacctgcgaatccttcgaccaccttcagtgcggcaaagtttgcttccttcatcacacagtactccacgggacaggtcagcgtggagatcgagtgggagctgcagaaggaaaacagcaaacgctggaatcccgaaattcagtacacttccaactacaacaagtctgttaatgtggactttactgtggacactaatggcgtgtattcagagcctcgccccattggcaccagatacctgactcgtaatctgtaa

SEQ ID NO: 12961 - DNA, 2208 bp, Artificial Sequence
  source: /note="Description of Artificial Sequence: Synthetic polynucleotide"
atggctgccgatggttatcttccagattggctcgaggacactctctctgaaggaataagacagtggtggaagctcaaacctggcccaccaccaccaaagcccgcagagcggcatagggacgacagcaggggtcttgtgcttcctgggtacaagtacctcggacccttcaacggactcgacaagggagagccggtcaacgaggcagacgccgcggccctcgagcacgacaaagcctacgaccggcagctcgacagcggagacaacccgtacctcaagtacaaccacgccgacgcggagtttcaggagcgccttaaagaagatacgtcttttgggggcaacctcggacgagcagtcttccaggcgaaaaagagggttcttgaacctctgggcctggttgaggaacctgttaagacggctccgggaaaaaagaggccggtagagcactctcctgtggagccagactcctcctcgggaaccggaaaggcgggccagcagcctgcaagaaaaagattgaattttggtcagactggagacgcagactcagtacctgacccccagcctctcggacagccaccagcagccccctctggtctgggaactaatacgatggctacaggcagtggcgcaccaatggcagacaataacgagggcgccgacggagtgggtaattcctcgggaaattggcattgcgattccacatggatgggcgacagagtcatcaccaccagcacccgaacctgggccctgcccacctacaacaaccacctctacaaacaaatttccagccaatcaggagcctcgaacggcaatcactactttggctacagcaccccttgggggtattttgacttcaacagattccactgccacttttcaccacgtgactggcaaagactcatcaacaacaactggggattccgacccaagagactcaacttcaagctctttaacattcaagtcaaagaggtcacgcagaatgacggtacgacgacgattgccaataaccttaccagcacggttcaggtgtttactgactcggagtaccagctcccgtacgtcctcggctcggcgcatcaaggatgcctcccgccgttcccagcagacgtcttcatggtgccacagtatggatacctcaccctgaacaacgggagtcaggcagtaggacgctcttcattttactgcctggagtactttccttctcagatgctgcgtaccggaaacaactttaccttcagctacacttttgaggacgttcctttccacagcagctacgctcacagccagagtctggaccgtctcatgaatcctctcatcgaccagtacctgtattacttgagcagaacaaacactccaagtggaaccaccacgcagtcaaggcttcagttttctcaggccgtagcgagtgacgttcgggaccagtctaggaactggcttcctggaccctgttaccgccagcagcgagtatcaaagacatctgcggataacaacaacagtgaatactcgtggactggagctaccaagtaccacctcaatggcagagactctctggtgaatccgggcccggccatggcaagccacaaggacgatgaagaaaagttttttcctcagagcggggttctcatctttgggaagcaaggctcagagaaaacaaatgtggacattgaaaaggtcatgattacagacgaagaggaaatcaggacaaccaatcccgtggctacggagcagtatggttctgtatctaccaacctccagaggggcaacagacaagcagctaccgcagatgtcaacacacaaggcgttcttccaggcatggtctggcaggacagagatgtgtaccttcaggggcccatctgggcaaagattccacacacggacggacattttcacccctctcccctcatgggtggattcggacttaaacaccctcctccacagattctcatcaagaacaccccggtacctgcgaatccttcgaccaccttcagtgcggcaaagtttgcttccttcatcacacagtactccacgggacaggtcagcgtggagatcgagtgggagctgcagaaggaaaacagcaaacgctggaatcccgaaattcagtacacttccaactacaacaagtctgttaatgtggactttactgtggacactaatggcgtgtattcagagcctcgccccattggcaccagatacctgactcgtaatctgtaa

SEQ ID NO: 12962 - DNA, 2208 bp, Artificial Sequence
  source: /note="Description of Artificial Sequence: Synthetic polynucleotide"
atggctgccgatggttatcttccagattggctcgaggacactctctctgaaggaataagacagcggtggaagctcaaacctggcccaccaccaccaaagcccgcagagcggcatagggacgacagcaggggtcttgtgcttcctgggtacaagtacctcggacccttcaacggactcgacaagggagagccggtcaacgaggcagacgccgcggccctcgagcacgacaaagcctacgaccggcagctcgacagcggagacaacccgtacctcaagtacaaccacgccgacgcggagtttcaggagcgccttaaagaagatacgtcttttgggggcaacctcggacgagcagtcttccaggcgaaaaagagggttcttgaacctctgggcctggttgaggaacctgttaagacggctccgggaaaaaagaggccggtagagcactctcctgtggagccagactcctcctcgggaaccggaaaggcgggccagcagcctgcaagaaaaagattgaattttggtcagactggagacgcagactcagtacctgacccccagcctctcggacagccaccagcagccccctctggtctgggaactaatacgatggctacaggcagtggcgcaccaatggcagacaataacgagggcgccgacggagtgggtaattcctcgggaaattggcattgcgattccacatggatgggcgacagagtcatcaccaccagcacccgaacctgggccctgcccacctacaacaaccacctctacaaacaaatttccagccaatcaggagcctcgaacggcaatcactactttggctacagcaccccttgggggtattttgacttcaacagattccactgccacttttcaccacgtgactggcaaagactcatcaacaacaactggggattccgacccaagagactcaacttcaagctctttaacattcaagtcaaagaggtcacgcagaatgacggtacgacgacgattgccaataaccttaccagcacggttcaggtgtttactgactcggagtaccagctcccgtacgtcctcggctcggcgcatcaaggatgcctcccgccgttcccagcagacgtcttcatggtgccacagtatggatacctcaccctgaacaacgggagtcaggcagtaggacgctcttcattttactgcctggagtactttccttctcagatgctgcgtaccggaaacaactttaccttcagctacacttttgaggacgttcctttccacagcagctacgctcacagccagagtctggaccgtctcatgaatcctctcatcgaccagtacctgtattacttgagcagaacaaacactccaagtggaaccaccacgcagtcaaggcttcagttttctcaggccggagcgagtgacattcgggaccagtctaggaactggcttcctggaccctgttaccgccagcagcgagtatcaaagacatctgcggataacaacaacagtgaatactcgtggactggagctaccaagtaccacctcaatggcagagactctctggtgaatccgggcccggccatggcaagccacaaggacgatgaagaaaagttttttcctcagagcggggttctcatctttgggaagcaaggctcagagaaaacaaatgtggacattgaaaaggtcatgattacagacgaagaggaaatcaggacaaccaatcccgtggctacggagcagtatggttctgtatctaccaacctccagaggggcaacagacaagcagctaccgcagatgtcaacacacaaggcgttcttccaggcatggtctggcaggacagagatgtgtaccttcaggggcccatctgggcaaagattccacacacggacggacattttcacccctctcccctcatgggtggattcggacttaaacaccctcctccacagattctcatcaagaacaccccggtacctgcgaatccttcgaccaccttcagtgcggcaaagtttgcttccttcatcacacagtactccacgggacaggtcagcgtggagatcgagtgggagctgcagaaggaaaacagcaaacgctggaatcccgaaattcagtacacttccaactacaacaagtctgttaatgtggactttactgtggacactaatggcgtgtattcagagcctcgccccattggcaccagatacctgactcgtaatctgtaa

SEQ ID NO: 12963 - DNA, 2208 bp, Artificial Sequence
  source: /note="Description of Artificial Sequence: Synthetic polynucleotide"
atggctgccgatggttatcttccagattggctcgaggacactctctctgaaggaataagacagtggtggaagctcaaacctggcccaccaccaccaaagcccgcagagcggcataaggacgacagcaggggtcttgtgcttcctgggtacaagtacctcggacccttcaacggactcgacaagggagagccggtcaacgaggcagacgccgcggccctcgagcacgacaaagcctacgaccggcagctcgacagcggagacaacccgtacctcaagtacaaccacgccgacgcggagtttcaggagcgccttaaagaagatacgtcttttgggggcaacctcggacgagcagtcttccaggcgaaaaagagggttcttgaacctctgggcctggttgaggaacctgttaagacggctccgggaaaaaagaggccggtagagcactctcctgtggagccagactcctcctcgggaaccggaaaggcgggccagcagcctgcaagaaaaagattgaattttggtcagactggagacgcagactcagtacctgacccccagcctctcggacagccaccagcagccccctctggtctgggaactaatacgatggctacaggcagtggcgcaccaatggcagacaataacgagggcgccgacggagtgggtaattcctcgggaaattggcattgcgattccacatggatgggcgacagagtcatcaccaccagcacccgaacctgggccctgcccacctacaacaaccacctctacaaacaaatttccagccaatcaggagcctcgaacgacaatcactactttggctacagcaccccttgggggtattttgacttcaacagattccactgccacttttcaccacgtgactggcaaagactcatcaacaacaactggggattccgacccaagagactcaacttcaagctctttaacattcaagtcaaagaggtcacgcagaatgacggtacgacgacgattgccaataaccttaccagcacggttcaggtgtttactgactcggagtaccagctcccgtacgtcctcggctcggcgcatcaaggatgcctcccgccgttcccagcagacgtcttcatggtgccacagtatggatacctcaccctgaacaacgggagtcaggcagtaggacgctcttcattttactgcctggagtactttccttctcagatgctgcgtaccggaaacaactttaccttcagctacacttttgaggacgttcctttccacagcagctacgctcacagccagagtctggaccgtctcatgaatcctctcatcgaccagtacctgtattacttgagcagaacaaacactccaagtggaaccaccacgcagtcaaggcttcagttttctcaggccggagcgagtgacattcgggaccagtctaggaactggcttcctggaccctgttaccgccagcagcgagtatcaaagacatctgcggataacaacaacagtgaatactcgtggactggagctaccaagtaccacctcaatggcagagactctctggtgaatccgggcccggccatggcaagccacaaggacgatgaagaaaagttttttcctcagagcggggttctcatctttgggaagcaaggctcagagaaaacaaatgtggacattgaaaaggtcatgactacagacgaagaggaaatcaggacaaccaatcccgtggctacggagcagtatggttctgtatctaccaacctccagaggggcaacagacaagcagctaccgcagatgtcaacacacaaggcgttcttccaggcatggtctggcaggacagagatgtgtaccttcaggggcccatctgggcaaagattccacacacggacggacattttcacccctctcccctcatgggtggattcggacttaaacaccctcctccacagattctcatcaagaacaccccggtacctgcgaatccttcgaccaccttcagtgcggcaaagtttgcttccttcatcacacagtactccacgggacaggtcagcgtggagatcgagtgggagctgcagaaggaaaacagcaaacgctggaatcccgaaattcagtacacttccaactacaacaagtctgttaatgtggactttactgtggacactaatggcgtgtattcagagcctcgccccattggcaccagatacctgactcgtaatctgtaa

SEQ ID NO: 12964 - DNA, 2208 bp, Artificial Sequence
  source: /note="Description of Artificial Sequence: Synthetic polynucleotide"
atggctgccgatggttatcttccagattggctcgaggacactctctctgaaggaataagacagtggtggaagctcaaacctggcccaccaccaccaaagcccgcagagcggcataaggacgacagcaggggtcttgtgcttcctgggtacaagtacctcggacccttcaacggactcgacaagggagagccggtcaacgaggcagacgccgcggccctcgagcacgacaaagcctacgaccggcagctcgacagcggagacaacccgtacctcaagtacaaccacgccgacgcggagtttcaggagcgccttaaagaagatacgtcttttgggggcaacctcggacgagcagtcttccaggcgaaaaagagggttcttgaacctccgggcctggttgaggaacctgttaagacggctccgggaaaaaagaggccggtagagcactctcctgtggagccagactcctcctcgggaaccggaaaggcgggccagcagcctgcaagaaaaagattgaattttggtcagactggagacgcagactcagtacctgacccccagcctctcggacagccaccagcagccccctctggtctgggaactaatacgatggctacaggcagtggcgcaccaatggcagacaataacgagggcgccgacggagtgggtaattcctcgggaaattggcattgcgattccacatggatgggcgacagagtcatcaccaccagcacccgaacctgggccctgcccacctacaacaaccacctctacaaacaaatttccagccaatcaggagcctcgaacgacaatcactactttggctacagcaccccttgggggtattttgacttcaacagattccactgccacttttcaccacgtgactggcaaagactcatcaacaacaactggggattccgacccaagagactcaacttcaagctctttaacattcaagtcaaagaggtcacgcagaatgacggtacgacgacgattgccaataaccttaccagcacggttcaggtgtttactgactcggagtaccagctcccgtacgtcctcggctcggcgcatcaaggatgcctcccgccgttcccagcagacgtcttcatggtgccacagtatggatacctcaccctgaacaacgggagtcaggcagtaggacgctcttcattttactgcctggagtactttccttctcagatgctgcgtaccggaaacaactttaccttcagctacacttttgaggacgttcctttccacagcagctacgctcacagccagagtctggaccgtctcatgaatcctctcatcgaccagtacctgtattacttgagcagaacaaacactccaagtggaaccaccacgcagtcaaggcttcagttttctcaggccggagcgagtgacattcgggaccagtctaggaactggcttcctggaccctgttaccgccagcagcgagtatcaaagacatctgcggataacaacaacagtgaatactcgtggactggagctaccaagtaccacctcaatggcagagactctctggtgaatccgggcccggccatggcaagccacaaggacgatgaagaaaagttttttcctcagagcggggttctcatctttgggaagcaaggctcagagaaaacaaatgtggacattgaaaaggtcatgactacagacgaagaggaaatcaggacaaccaatcccgtggctacggagcagtatggttctgtatctaccaacctccagagaggcaacagacaagcagctaccgcagatgtcaacacacaaggcgttcttccaggcatggtctggcaggacagagatgtgtaccttcaggggcccatctgggcaaagattccacacacggacggacattttcacccctctcccctcatgggtggattcggacttaaacaccctcctccacagattctcatcaagaacaccccggtacctgcgaatccttcgaccaccttcagtgcggcaaagtttgcttccttcatcacacagtactccacgggacaggtcagcgtggagatcgagtgggagctgcagaaggaaaacagcaaacgctggaatcccgaaattcagtacacttccaactacaacaagtctgttaatgtggactttactgtggacactaatggcgtgtattcagagcctcgccccattggcaccagatacctgactcgtaatctgtaa

SEQ ID NO: 12965 - DNA, 2208 bp, Artificial Sequence
  source: /note="Description of Artificial Sequence: Synthetic polynucleotide"
atggctgccgatggttatcttccagattggctcgaggacactctctctgaaggaataagacagtggtggaagctcaaacctggcccaccaccaccaaagcccgcagagcggcataaggacgacagcaggggtcttgtgcttcctgggtacaagtacctcggacccttcaacggactcgacaagggagagccggtcaacgaggcagacgccgcggccctcgagcacgacaaagcctacgaccggcagctcgacagcggagacaacccgtacctcaagtacaaccacgccgacgcggagtttcaggagcgccttaaagaagatacgtcttttgggggcaacctcggacgagcagtcttccaggcgaaaaagagggttcttgaacctctgggcctggttgaggaacctgttaagacggctccgggaaaaaagaggccggtagagcactctcctgtggagccagactcctcctcgggaaccggaaaggcgggccagcagcctgcaagaaaaagattgaattttggtcagactggagacgcagactcagtacctgacccccagcctctcggacagccaccagcagccccctctggtctgggaactaatacgatggctacaggcagtggcgcaccaatggcagacaataacgagggcgccgacggagtgggtaattcctcgggaaattggcattgcgattccacatggatgggcgacagagtcatcaccaccagcacccgaacctgggccctgcccacctacaacaaccacctctacaaacaaatttccagccaatcaggagcctcgaacgacaatcactactttggctacagcaccccttgggggtattttgacttcaacagattccactgccacttttcaccacgtgactggcaaagactcatcaacaacaactggggattccgacccaagagactcaacttcaagctctttaacattcaagtcaaagaggtcacgcagaatgacggtacgacgacgattgccaataaccttaccagcacggttcaggtgtttactgactcggagtaccagctcccgtacgtcctcggctcggcgcatcaaggatgcctcccgccgttcccagcagacgtcttcatggtgccacagtatggatacctcaccctgaacaacgggagtcaggcagtaggacgctcttcattttactgcctggagtactttccttctcagatgctgcgtaccggaaacaactttaccttcagctacacttttgaggacgttcctttccacagcagctacgctcacagccagagtctggaccgtctcatgaatcctctcatcgaccagtacctgtattacttgagcagaacaaacactccaagtggaaccaccacgcagtcaaggcttcagttttctcaggccggagcgagtgacattcgggaccagtctaggaactggcttcctggaccctgttaccgccagcagcgagtatcaaagacatctgcggataacaacaacagtgaatactcgtggactggagctaccaagtaccacctcaatggcagagactctctggtgaatccgggcccggccatggcaagccacaaggacgatgaagaaaagttttttcctcagagcggggttctcatctttgggaagcaaggctcagagaaaacaaatgtggacattgaaaaggtcatgactacagacgaagaggaaatcaggacaaccaatcccgtggctacggagcagtatggttctgtatctaccaacctccagagaggcaacagacaagcagctaccgcagatgtcaacacacaaggcgttcttccaggcatggtctggcaggacagagatgtgtaccttcaggggcccatctgggcaaagattccacacacggacggacattttcacccctctcccctcatgggtggattcggacttaaacaccctcctccacagattctcatcaagaacaccccggtacctgcgaatccttcgaccaccttcagtgcggcaaagtttgcttccttcatcacacagtactccacgggacaggtcagcgtggagatcgagtgggagctgcagaaggaaaacggcaaacgctggaatcccgaaattcagtacacttccaactacaacaagtctgttaatgtggactttactgtggacactaatggcgtgtattcagagcctcgccccattggcaccagatacctgactcgtaatctgtaa

SEQ ID NO: 12966 - DNA, 2208 bp, Artificial Sequence
  source: /note="Description of Artificial Sequence: Synthetic polynucleotide"
atggctgccgatggttatcttccagattggctcgaggacactctctctgaaggaataagacagtggtggaagctcaaacctggcccaccaccgccagagcccgcagagcggcacaaggacgacagtaggggtcttgtgcttcctgggtacaagtacctcggacccttcaacggactcgacaaaggagagccggtcaacgaggcagacgccgcggccctcgagcacgacaaggcctacgaccggcagctcgacagcggagacaacccgtacctcaagtacaaccacgccgacgcggagtttcaggagcgtcttaaagaagatacgtcttttgggggcaacctcggacgagcagtattccaggcgaaaaagagggttcttgaacctctgggcctggttgaggagcctgttaagacggctccgggaaaaaagaggccggtagagcactctcctgtggagccagactcctcctcgggaaccggaaaagcgggccagcagcctgcaagaaaaagattgaattttggtcagactggagacgcagactccgtacctgacccccagcctctcggacagccaccagcagcccccacaagtttgggatctactacaatggctacaggcagtggcgcaccaatggcagacaataacgagggtgccgatggagtgggtaattcctcaggaaattggcattgcgattcccaatggctgggcgacagagtcatcaccaccagcacccgaacctgggccctgcccacctacaacaaccacctctacaagcaaatctccagccaatcaggagcatcgaacgacaaccactactttggccacagcaccccttgggggtattttgacttcaacagattccactgtcacttctccccacgtgactggcaaagactcatcaacaacaactggggattccgacccaagagactcaacttcaagctctttaacattcaagtcaaagaggtcacgcagaatgacggtacgacgacgattgccaataaccttaccagcacggttcaggtgtttactgactcggagtaccagctcccgtacgtcctcggctcggcgcatcaaggatgcctcccgccgttcccagcagacgtcttcatggtcccacagtatggatacctcaccctgaacaacgggagtcaggcggtaggacgctcttccttttactgcctggagtactttccttctcagatgcttcgtaccggaaacaactttaccttcagctacacctttgaagacgtgcctttccacagtagctacgctcacagccagagtctggatcggctgatgaatcctcttatcgaccagtacctgtattatctaaacaaaacacaatcaaatagtggaactcttcagcagtctcggctactgtttagtcaagctggacccaccagcatgtctcttcaagctaaaaactggctgcctggaccttgctacagacaacagcgtctgtcaaagcaggcaaacgacaacaacaacagcaactttccctggactgcggctacaaagtatcatctaaatggccgggactcgttggttaatccaggaccagctatggccagccacaaagacgatgaagaaaagtttttccccatgcatggaaccctgatatttggtaaacaaggaacaaatgctaacgacgcggatttggacaatgtcatgattacagatgaagaagaaatccgcaccaccaatcccgtggctacggagcagtacgggactgtgtcaaataatttgcaaaactcaaatactggtccaactactggaactgtcaatcaccaaggagcgttacctggtatggtgtggcaggatcgagacgtgtacctgcagggacccatttgggccaagattcctcacaccgatggacactttcatccttctccactgatgggaggttttggactcaaacacccgcctcctcagatcatgatcaaaaacactcccgttccagccaatcctcctacaaacttcagttctgccaagtttgcttccttcatcacacagtattccacgggacaagtcagcgtggagattgagtgggagctgcagaaggagaacagcaaacgctggaaccccgagatccagtacacttccaactacaacaaatctgttaatgtggactttactgtggacactaatggcgtgtattcagagcctcgccccattggcaccagatacctgactcgtaatctgtaa

SEQ ID NO: 12967 - DNA, 2208 bp, Artificial Sequence
  source: /note="Description of Artificial Sequence: Synthetic polynucleotide"
atggctgccgatggttatcttccagattggctcgaggacactctctctgaaggaataagacagtggtggaagctcaaacctggcccaccaccgccaaagcccgcagagcggcacaaggacgacagtaggggtcttgtgcttcctgggtacaagtacctcggacccttcaacggactcgacaaaggagagccggtcaacgaggcagacgccgcggccctcgagcacgacaaggcctacgaccggcagctcgacagcggagacaacccgtacctcaagtacaaccacgccgacgcggagtttcaggagcgtcttaaagaagatacgtcttttgggggcaacctcggacgagcagtattccaggcgaaaaagagggttcttgaacctctgggcctggttgaggagcctgttaagacggctccgggaaaaaagaggccggtagagcactctcctgtggagccagactcctcctcgggaaccggaaaagcgggccagcagcctgcaagaaaaagattgaattttggtcagactggagacgcagactccgtacctgacccccagcctctcggacagccaccagcagcccccacaagtttgggatctactacaatggctacaggcagtggcgcaccaatggcagacaataacgagggtgccgatggagtgggtaattcctcaggaaattggcattgcgattcccaatggctgggcgacagagtcatcaccaccagcacccgaacctgggccctgcccacctacaacaaccacctctacaagcaaatctccagccaatcaggagcatcgaacgacaaccactactttggccacagcaccccttgggggtattttgacttcaacagattccactgtcacttctccccacgtgactggcaaagactcatcaacaacaactggggattccgacccaagagactcaacttcaagctctttaacattcaagtcaaagaggtcacgcagaatgacggtacgacgacgattgccaataaccttaccagcacggttcaggtgtttactgactcggagtaccagctcccgtacgtcctcggctcggcgcatcaaggatgcctcccgccgttcccagcagacgtcttcatggtctcacagtatggatacctcaccctgaacaacgggagtcaggcggtaggacgctcttccttttactgcctggagtactttccttctcagatgcttcgtaccggaaacaactttaccttcagctacacctttgaagacgtgcctttccacagtagctacgctcacagccagagtctggatcggctgatgaatcctcttatcgaccagtacctgtattatctaaacaaaacacaatcaaatagtggaactcttcagcagtctcggctactgtttagtcaagctggacccaccagcatgtctcttcaagctaaaaactggctgcctggaccttgctacagacaacagcgtctgtcaaagcaggcaaacgacaacaacaacagcaactttccctggactgcggctacaaagtatcatctaaatggccgggactcgttggttaatccaggaccagctatggccagccacaaagacgatgaagaaaagtttttccccatgcatggaaccctgatatttggtaaacaaggaacaaatgctaacgacgcggatttggacaatgtcatgattacagatgaagaagaaatccgcaccaccaatcccgtggctacggagcagtacgggactgtgtcaaataatttgcaaaactcaaatactggtccaactactggaactgtcaatcaccaaggagcgttacctggtatggtgtggcaggatcgagacgtgtacctgcagggacccatttgggccaagattcctcacaccgatggacactttcatccttctccactgatgggaggttttggactcaaacacccgcctcctcagatcatgatcaaaaacactcccgttccagccaatcctcctacaaacttcagttctgccaagtttgcttccttcatcacacagtattccacgggacaagtcagcgtggagattgagtgggagctgcagaaggagaacagcaaacgctggaaccccgagatccagtacacttccaactacaacaaatctgttaatgtggactttactgtggacactaatggcgtgtattcagagcctcgccccattggcaccagatacctgactcgtaatctgtaa

SEQ ID NO: 12968 - DNA, 2208 bp, Artificial Sequence
  source: /note="Description of Artificial Sequence: Synthetic polynucleotide"
atggctgccgatggttatcttccagattggctcgaggacactctctctgaaggaataagacagtggtggaagctcaaacctggcccaccaccgccaaagcccgcagagcggcacaaggacgacagtaggggtcttgtgcttcctgggtacaagtacctcggacccttcaacggactcgacaaaggagagccggtcaacgaggcagacgccgcggccctcgagcacgacaaggcctacgaccggcagctcgacagcggagacaacccgtacctcaagtacaaccacgccgacgcggagtttcaggagcgtcttaaagaagatacgtcttttgggggcaacctcggacgagcagtattccaggcgaaaaagagggttcttgaacctctgggcctggttgaggagcctgttaagacggctccgggaaaaaagaggccggtagagcactctcctgtggagccagactcctcctcgggaaccggaaaagcgggccagcagcctgcaagaaaaagattgaattttggtcagactggagacgcagactccgtacctgacccccagcctctcggacagccaccagcagcccccacaagtttgggatctactacaatggctacaggcagtggcgcaccaatggcagacaataacgagggtgccgatggagtgggtaattcctcaggaaattggcattgcgattcccaatggctgggcgacagagtcatcaccaccagcacccgaacctgggccctgcccacctacaacaaccacctctacaagcaaatctccagccaatcaggagcatcgaacgacaaccactactttggccacagcaccccttgggggtattttgacttcaacagattccactgtcacttctccccacgtgactggcaaagactcatcaacaacaactggggattccgacccaagagactcaacttcaagctctttaacattcaagtcaaagaggtcacgcagaatgacggtacgacgacgattgccaataaccttaccagcacggttcaggtgtttactgactcggagtaccagctcccgtacgtcctcggctcggcgcatcaaggatgcctcccgccgttcccagcagacgtcttcatggtctcacagtatggatacctcaccctgaacaacgggagtcaggcggtaggacgctcttccttttactgcctggagtactttccttctcagatgcttcgtaccggaaacaactttaccttcagctacacctttgaagacgtgcctttccacagtagctacgctcacagccagagtctggatcggctgatgaatcctcttatcgaccagtacctgtattatctaaacaaaacacaatcaaatagtggaactcttcagcagtctcggctactgtttagtcaagctggacccaccagcatgtctcttcaagctaaaaactggctgcctggaccttgctacagacaacagcgtctgtcaaagcaggcaaacgacaacaacaacagcaactttccctggactgcggctacaaagtatcatctaaatggccgggactcgttggttaatccaggaccagctatggccagccacaaagacgatgaagaaaagcttttccccatgcatggaaccctgatatttggtaaacaaggaacaaatgctaacgacgcggatttggacaatgtcatgattacagatgaagaagaaatccgcaccaccaatcccgtggctacggagcagtacgggactgtgtcaaataatttgcaaaactcaaatactggtccaactactggaactgtcaatcaccaaggagcgttacctggtatggtgtggcaggatcgagacgtgtacctgcagggacccatttgggccaagattcctcacaccgatggacactttcatccttctccactgatgggaggttttggactcaaacacccgcctcctcagatcatgatcaaaaacactcccgttccagccaatcctcctacaaacttcagttctgccaagtttgcttccttcatcacacagtattccacgggacaagtcagcgtggagattgagtgggagctgcagaaggagaacagcaaacgctggaaccccgagatccagtacacttccaactacaacaaatctgttaatgtggactttactgtggacactaatggcgtgtattcagagcctcgccccattggcaccagatacctgactcgtaatctgtaa

SEQ ID NO: 12969 - DNA, 2208 bp, Artificial Sequence
  source: /note="Description of Artificial Sequence: Synthetic polynucleotide"
atggctgccgatggttatcttccagattggctcgaggacactctctctgaaggaataagacagtggtggaagctcaaacctggcccaccaccgccaaagcccgcagagcggcacaaggacgacagtaggggtcttgtgcttcctgggtacaagtacctcggacccttcaacggactcgacaaaggagagccggtcaacgaggcagacgccgcggccctcgagcacgacaaggcctacgaccggcagctcgacagcggagacaacccgtacctcaagtacaaccacgccgacgcggagtttcaggagcgtcttaaagaagatacgtcttttgggggcaacctcggacgagcagtattccaggcgaaaaagagggttcttgaacctctgggcctggttgaggagcctgttaagacggctccgggaaaaaagaggccggtagagcactctcctgtggagccagactcctcctcgggaaccggaaaagcgggccagcagcctgcaagaaaaagattgaattttggtcagactggagacgcagactccgtacctgacccccagcctctcggacagccaccagcagcccccacaagtttgggatctactacaatggctacaggcagtggcgcaccaatggcagacaataacgagggtgccgatggagtgggtaattcctcaggaaattggcattgcgattcccaatggctgggcgacagagtcatcaccaccagcacccgaacctgggccctgcccacctacaacaaccacctctacaagcaaatctccagccaatcaggagcatcgaacgacaaccactactttggccacagcaccccttgggggtattttgacttcaacagattccactgtcacttctccccacgtgactggcaaagactcatcaacaacaactggggattccgacccaagagactcaacttcaagctctttaacattcaagtcaaagaggtcacgcagaatgacggtacgacgacgattgccaataaccttaccagcacggttcaggtgtttactgactcggagtaccagctcccgtacgtcctcggctcggcgcatcaaggatgcctcccgccgttcccagcagacgtcttcatggtcccacagtatggatacctcaccctgaacaacgggagtcaggcggtaggacgctcttccttttactgcctggagtactttccttctcagatgcttcgtaccggaaacaactttaccttcagctacacctttgaagacgtgcctttccacagtagctacgctcacagccagagtctggatcggctgatgaatcctcttatcgaccagtacctgtattatctaaacaaaacacaatcaaatagtggaactcttcagcagtctcggctactgtttagtcaagctggacccaccagcatgtctcttcaagctaaaaactggctgcctggaccttgctacagacaacagcgtctgtcaaagcaggcaaacgacaacaacaacagcaacttttcctggactgcggctacaaagtatcatctaaatggccgggactcgttggttaatccaggaccagctatggccagccacaaagacgatgaagaaaagtttttccccatgcatggaaccctgatatttggtaaacaaggaacaaatgctaacgacgcggatttggacaatgtcatgattacagatgaagaagaaatccgcaccaccaatcccgtggctacggagcagtacgggactgtgtcaaataatttgcaaaactcaaatactggtccaactactggaactgtcaatcaccaaggagcgttacctggtatggtgtggcaggatcgagacgtgtacctgcagggacccatttgggccaagattcctcacaccgatggacactttcatccttctccactgatgggaggttttggactcaaacacccgcctcctcagatcatgatcaaaaacactcccgttccagccaatcctcctacaaacttcagttctgccaagtttgcttccttcatcacacagtattccacgggacaagtcagcgtggagattgagtgggagctgcagaaggagaacagcaaacgctggaaccccgagatccagtacacttccaactacaacaaatctgttaatgtggactttactgtggacactaatggcgtgtattcagagcctcgccccattggcaccagatacctgactcgtaatctgtaa

SEQ ID NO: 12970 - DNA, 2208 bp, Artificial Sequence
  source: /note="Description of Artificial Sequence: Synthetic polynucleotide"
atggctgccgatggttatcttccagattggctcgaggacactctctctgaaggaataagacagtggtggaagctcaaacctggcccaccaccgccaaagcccgcagagcggcacaaggacgacagtaggggtcttgtgcttcctgggtacaagtacctcggacccttcaacggactcgacaaaggagagccggtcaacgaggcagacgccgcggccctcgagcacgacaaggcctacgaccggcagctcgacagcggagacaacccgtacctcaagtacaaccacgccgacgcggagtttcaggagcgtcttaaagaagatacgtcttttgggggcaacctcggacgagcagtattccaggcgaaaaagagggttcttgaacctctgggcctggttgaggagcctgttaagacggctccgggaaaaaagaggccggtagagcactctcctgtggagccagactcctcctcgggaaccggaaaagcgggccagcagcctgcaagaaaaagattgaattttggtcagactggagacgcagactccgtacctgacccccagcctctcggacagccaccagcagcccccacaagtttgggatctactacaatggctacaggcagtggcgcaccaatggcagacaataacgagggtgccgatggagtgggtaattcctcaggaaattggcattgcgattcccaatggctgggcgacagagtcatcaccaccagcacccgaacctgggccctgcccacctacaacaaccacctctacaagcaaatctccagccaatcaggagcatcgaacgacaaccactactttggccacagcaccccttgggggtattttgacttcaacagattccactgtcacttctccccacgtgactggcaaagactcatcaacaacaactggggattccgacccaagagactcaacttcaagctctttaacattcaagtcaaagaggtcacgcagaatgacggtacgacgacgattgccaataaccttaccagcacggttcaggtgtttactgactcggagtaccagctcccgtacgtcctcggctcggcgcatcaaggatgcctcccgccgttcccagcagacgtcttcatggtcccacagtatggatacctcaccctgaacaacgggagtcaggcggtaggacgctcttccttttactgcctggagtactttccttctcagatgcttcgtaccggaaacaactttaccttcagctacacctttgaagacgtgcctttccacagtagctacgctcacagccagagtctggatcggctgatgaatcctcttatcgaccagtacctgtattatctaaacaaaacacaatcaaatagtggaactcttcagcagtctcggctactgtttagtcaagctggacccaccagcatgtctcttcaagctaaaaactggctgcctggaccttgctacagacaacagcgtctgtcaaagcaggcaaacgacaacaacaacagcaactttccctggactgcggctacaaagtatcatctaaatggccgggactcgttggttaatccaggaccagctatggccagccacaaagacgatgaagaaaagtttttccccatgcatggaaccctgatatttggtaaacaaggaacaaatgctaacgacgcggatttggacaatgtcatgattacagatgaagaagaaatccgcaccaccaatcccttggctacggagcagtacgggactgtgtcaaataatttgcaaaactcaaatactggtccaactactggaactgtcaatcaccaaggagcgttacctggtatggtgtggcaggatcgagacgtgtacctgcagggacccatttgggccaagattcctcacaccgatggacactttcatccttctccactgatgggaggttttggactcaaacacccgcctcctcagatcatgatcaaaaacactcccgttccagccaatcctcctacaaacttcagttctgccaagtttgcttccttcatcacacagtattccacgggacaagtcagcgtggagattgagtgggagctgcagaaggagaacagcaaacgctggaaccccgagatccagtacacttccaactacaacaaatctgttaatgtggactttactgtggacactaatggcgtgtattcagagcctcgccccattggcaccagatacctgactcgtaatctgtaa

SEQ ID NO: 12971 - DNA, 2208 bp, Artificial Sequence
  source: /note="Description of Artificial Sequence: Synthetic polynucleotide"
atggctgccgatggttatcttccagattggctcgaggacactctctctgaaggaataagacagtggtggaagctcaaacctggcccaccaccgccaaagcccgcagagcggcacaaggacgacagtaggggtcttgtgcttcctgggtacaagtacctcggacccttcaacggactcgacaaaggagagccggtcaacgaggcagacgccgcggccctcgagcacgacaaggcctacgaccggcagctcgacagcggagacaacccgtacctcaagtacaaccacgccgacgcggagtttcaggagcgtcttaaagaagatacgtcttttgggggcaacctcggacgagcagtattccaggcgaaaaagagggttcttgaacctctgggcctggttgaggagcctgttaagacggctccgagaaaaaagaggccggtagagcactctcctgtggagccagactcctcctcgggaaccggaaaagcgggccagcagcctgcaagaaaaagattgaattttggtcagactggagacgcagactccgtacctgacccccagcctctcggacagccaccagcagcccccacaagtttgggatctactacaatggctacaggcagtggcgcaccaatggcagacaataacgagggtgccgatggagtgggtaattcctcaggaaattggcattgcgattcccaatggctgggcgacagagtcatcaccaccagcacccgaacctgggccctgcccacctacaacaaccacctctacaagcaaatctccagccaatcaggagcatcgaacgacaaccactactttggccacagcaccccttgggggtattttgacttcaacagattccactgtcacttctccccacgtgactggcaaagactcatcaacaacaactggggattccgacccaagagactcaacttcaagctctttaacattcaagtcaaagaggtcacgcagaatgacggtacgacgacgattgccaataaccttaccagcacggttcaggtgtttactgactcggagtaccagctcccgtacgtcctcggctcggcgcatcaaggatgcctcccgccgttcccagcagacgtcttcatggtcccacagtatggatacctcaccctgaacaacgggagtcaggcggtaggacgctcttccttttactgcctggagtactttccttctcagatgcttcgtaccggaaacaactttaccttcagctacacctttgaagacgtgcctttccacagtagctacgctcacagccagagtctggatcggctgatgaatcctcttatcgaccagtacctgtattatctaaacaaaacacaatcaaatagtggaactcttcagcagtctcggctactgtttagtcaagctggacccaccagcatgtctcttcaagctaaaaactggctgcctggaccttgctacagacaacagcgtctgtcaaagcaggcaaacgacaacaacaacagcaactttccctggactgcggctacaaagtatcatctaaatggccgggactcgttggttaatccaggaccagctatggccagccacaaagacgatgaagaaaagtttttccccatgcatggaaccctgatatttggtaaacaaggaacaaatgctaacgacgcggatttggacaatgtcatgattacagatgaagaagaaatccgcaccaccaatcccgtggctacggagcagtacgggactgtgtcaaataatttgcaaaactcaaatactggtccaactactggaactgtcaatcaccaaggagcgttacctggtatggtgtggcaggatcgagacgtgtacctgcagggacccatttgggccaagattcctcacaccgatggacactttcatccttctccactgatgggaggttttggactcaaacacccgcctcctcagatcatgatcaaaaacactcccgttccagccaatcctcctacaaacttcagttctgccaagtttgcttccttcatcacacagtattccacgggacaagtcagcgtggagattgagtgggagctgcagaaggagaacagcaaacgctggaaccccgagatccagtacacttccaactacaacaaatctgttaatgtggactttactgtggacactaatggcgtgtattcagagcctcgccccattggcaccagatacctgactcgtaatctgtaa

SEQ ID NO: 12972 - DNA, 2208 bp, Artificial Sequence
  source: /note="Description of Artificial Sequence: Synthetic polynucleotide"
atggctgccgatggttatcttccagattggctcgaggacactctctctgaaggaataagacagtggtggaagctcaaacctggcccaccaccgccaaagcccgcagagcggcacaaggacgacagtaggggtcttgtgcttcctgggtacaagtacctcggacccttcaacggactcgacaaaggagagccggtcaacgaggcagacgccgcggccctcgagcacgacaaggcctacgaccggcagctcgacagcggagacaacccgtacctcaagtacaaccacgccgacgcggagtttcaggagcgtcttaaagaagatacgtcttttgggggcaacctcggacgagcagtattccaggcgaaaaagagggttcttgaacctctgggcctggttgaggagcctgttaagacggctccgggaaaaaagaggccggtagagcactctcctgtggagccagactcctcctcgggaaccggaaaagcgggccagcagcctgcaagaaaaagattgaattttggtcagactggagacgcagactccgtacctgacccccagcctctcggacagccaccagcagcccccacaagtttgggatctactacaatggctacaggcagtggcgcaccaatggcagacaataacgagggtgccgatggagtgggtaattcctcaggaaattggcattgcgattcccaatggctgggcgacagagtcatcaccaccagcacccgaacctgggccctgcccacctacaacaaccacctctacaagcaaatctccagccaatcaggagcatcgaacgacaaccactactttggccacagcaccccttgggggtattttgacttcaacagattccactgtcacttctccccacgtgactggcaaagactcatcaacaacaactggggattccgacccaagagactcaacttcaagctctttaacattcaagtcaaagaggtcacgcagaatgacggtacgacgacgattgccaataaccttaccagcacggttcaggtgtttactgactcggagtaccagctcccgtacgtcctcggctcggcgcatcaaggatgcctcccgccgttcccagcagacgtcttcatggtcccacagtatggatacctcaccctgaacaacgggagtcaggcggtaggacgctcttccttttactgcctggagtactttccttctcagatgcttcgtaccggaaacaactttaccttcagctacacctttgaagacgtgcctttccacagtagctacgctcacagccagagtctggatcggctgatgaatcctcttatcgaccagtacctgtattatctaaacaaaacacaatcaaatagtggaactcttcagcagtctcggctactgtttagtcaagctggacccaccagcatgtctcttcaagctaaaaactggctgcctggaccttgctacagacaacagcgtctgtcaaagcaggcaaacgacaacaacaacagcaactttccctggactgcggctacaaagtatcatctaaatggccgggactcgttggttaatccaggaccagctatggccagccacaaagacgatgaagaaaagtttttccccatgcatggaaccctgatatttggtaaacaaggaacaaatgctaacgacgcggatttggacaatgtcatgattacagatgaagaagaaatccgcaccaccaatcccgtggctacggagcagtacgggactgtgtcaaataatttgcaaaactcaaatactggtccaactactggaactgtcaatcaccaaggagcgttacctggtatggtgtggcaggatcgagacgtgtacctgcagggacccatttgggccaagattcctcacaccgatggacgctttcatccttctccactgatgggaggttttggactcaaacacccgcctcctcagatcatgatcaaaaacactcccgttccagccaatcctcctacaaacttcagttctgccaagtttgcttccttcatcacacagtattccacgggacaagtcagcgtggagattgagtgggagctgcagaaggagaacagcaaacgctggaaccccgagatccagtacacttccaactacaacaaatctgttaatgtggactttactgtggacactaatggcgtgtattcagagcctcgccccattggcaccagatacctgactcgtaatctgtaa

SEQ ID NO: 12973 - DNA, 2208 bp, Artificial Sequence
  source: /note="Description of Artificial Sequence: Synthetic polynucleotide"
atggctgccgatggttatcttccagattggctcgaggacactctctctgaaggaataagacagtggtggaagctcaaacctggcccaccaccgccaaagcccgcagagcggcacaaggacgacagtaggggtcttgtgcttcctgggtacaagtacctcggacccttcaacggactcgacaaaggagagccggtcaacgaggcagacgccgcggccctcgagcacgacaaggcctacgaccggcagctcgacagcggagacaacccgtacctcaagtacaaccacgccgacgcggagtttcaggagcgtcttaaagaagatacgtcttttgggggcaacctcggacgagcagtattccaggcgaaaaagagggttcttgaacctctgggcctggttgaggagcctgttaagacggctccgggaaaaaagaggccggtagagcactctcctgtggagccagactcctcctcgggaaccggaaaagcgggccagcagcctgcaagaaaaagattgaattttggtcagactggagacgcagactccgtacctgacccccagcctctcggacagccaccagcagcccccacaagtttgggatctactacaatggctacaggcagtggcgcaccaatggcagacaataacgagggtgccgatggagtgggtaattcctcaggaaattggcattgcgattcccaatggctgggcgacagagtcatcaccaccagcacccgaacctgggccctgcccacctacagcaaccacctctacaagcaaatctccagccaatcaggagcatcgaacgacaaccactactttggccacagcaccccttgggggtattttgacttcaacagattccactgtcacttctccccacgtgactggcaaagactcatcaacaacaactggggattccgacccaagagactcaacttcaagctctttaacattcaagtcaaagaggtcacgcagaatgacggtacgacgacgattgccaataaccttaccagcacggttcaggtgtttactgactcggagtaccagctcccgtacgtcctcggctcggcgcatcaaggatgcctcccgccgctcccagcagacgtcttcatggtcccacagtatggatacctcaccctgaacaacgggagtcaggcggtaggacgctcttccttttactgcctggagtactttccttctcagatgcttcgtaccggaaacaactttaccttcagctacacctttgaagacgtgcctttccacagtagctacgctcacagccagagtctggatcggctgatgaatcctcttatcgaccagtacctgtattatctaaacaaaacacaatcaaatagtggaactcttcagcagtctcggctactgtttagtcaagctggacccaccagcatgtctcttcaagctaaaaactggctgcctggaccttgctacagacaacagcgtctgtcaaagcaggcaaacgacaacaacaacagcaactttccctggactgcggctacaaagtatcatctaaatggccgggactcgttggttaatccaggaccagctatggccagccacaaagacgatgaagaaaagtttttccccatgcatggaaccctgatatttggtaaacaaggaacaaatgctaacgacgcggatttggacaatgtcatgattacagatgaagaagaaatccgcaccaccaatcccgtggctacggagcagtacgggactgtgtcaaataatttgcaaaactcaaatactggtccaactactggaactgtcaatcaccaaggagcgttacctggtatggtgtggcaggatcgagacgtgtacctgcagggacccatttgggccaagattcctcacaccgatggacactttcatccttctccactgatgggaggttttggactcaaacacccgcctcctcagatcatgatcaaaaacactcccgttccagccaatcctcctacaaacttcagttctgccaagtttgcttccttcatcacacagtattccacgggacaagtcagcgtggagattgagtgggagctgcagaaggagaacagcaaacgctggaaccccgagatccagtacacttccaactacaacaaatctgttaatgtggactttactgtggacactaatggcgtgtattcagagcctcgccccattggcaccagatacctgactcgtaatctgtaa

SEQ ID NO: 12974 - DNA, 2208 bp, Artificial Sequence
  source: /note="Description of Artificial Sequence: Synthetic polynucleotide"
atggctgccgatggttatcttccagattggctcgaggacactctctctgaaggaataagacagtggtggaagctcaaacctggcccaccaccgccaaagcccgcagagcggcacaaggacgacagtaggggtcttgtgcttcctgggtacaagtacctcggacccttcaacggactcgacaaaggagagccggtcaacgaggcagacgccgcggccctcgagcacgacaaggcctacgaccggcagctcgacagcggagacaacccgtacctcaagtacaaccacgccgacgcggagtttcaggagcgtcttaaagaagatacgtcttttgggggcaacctcggacgagcagtattccaggcgaaaaagagggttcttgaacctctgggcctggttgaggagcctgttaagacggctccgggaaaaaagaggccggtagagcactctcctgtggagccagactcctcctcgggaaccggaaaagcgggccagcagcctgcaagaaaaagattgaattttggtcagactggaggcgcagactccgtacctgacccccagcctctcggacagccaccagcagcccccacaagtttgggatctactacaatggctacaggcagtggcgcaccaatggcagacaataacgagggtgccgatggagtgggtaattcctcaggaaattggcattgcgattcccaatggctgggcgacagagtcatcaccaccagcacccgaacctgggccctgcccacctacaacaaccacctctacaagcaaatctccagccaatcaggagcatcgaacgacaaccactactttggccacagcaccccttgggggtattttgacttcaacagattccactgtcacttctccccacgtgactggcaaagactcatcaacaacaactggggattccgacccaagagactcaacttcaagctctttaacattcaagtcaaagaggtcacgcagaatgacggtacgacgacgattgccaataaccttaccagcacggttcaggtgtttactgactcggagtaccagctcccgtacgtcctcggctcggcgcatcaaggatgcctcccgccgttcccagcagacgtcttcatggtcccacagtatggatacctcaccctgaacaacgggagtcaggcggtaggacgctcttccttttactgcctggagtactttccttctcagatgcttcgtaccggaaacaactttaccttcagctacacctttgaagacgtgcctttccacagtagctacgctcacagccagagtctggatcggctgatgaatcctcttatcgaccagtacctgtattatctaaacaaaacacaatcaaatagtggaactcttcagcagtctcggctactgtttagtcaagctggacccaccagcatgtctcttcaagctaaaaactggctgcctggaccttgctacagacaacagcgtctgtcaaagcaggcaaacgacaacaacaacagcaactttccctggactgcggctacaaagtatcatctaaatggccgggactcgttggttaatccaggaccagctatggccagccacaaagacgatgaagaaaagtttttccccatgcatggaaccctgatatttggtaaacaaggaacaaatgctaacgacgcggatttggacaatgtcatgattacagatgaagaagaaatccgcaccaccaatcccgtggctacggagcagtacgggactgtgtcaaataatttgcaaaactcaaatactggtccaactactggaactgtcaatcaccaaggagcgttacctggtatggtgtggcaggatcgagacgtgtacctgcagggacccatttgggccaagattcctcacaccgatggacactttcatccttctccactgatgggaggttttggactcaaacacccgcctcctcagatcatgatcaaaaacactcccgttccagccaatcctcctacaaacttcagttctgccaagtttgcttccttcatcacacagtattccacgggacaagtcagcgtggagattgagtgggagctgcagaaggagaacagcaaacgctggaaccccgagatccagtacacttccaactacaacaaatctgttaatgtggactttactgtggacactaatggcgtgtattcagagcctcgccccattggcaccagatacctgactcgtaatctgtaa

SEQ ID NO: 12975 - DNA, 2208 bp, Artificial Sequence
  source: /note="Description of Artificial Sequence: Synthetic polynucleotide"
atggctgccgatggttatcttccagattggctcgaggacactctctctgaaggaataagacagtggtggaagctcaaacctggcccaccaccgccaaagcccgcagagcggcacaaggacgacagtaggggtcttgtgcttcctgggtacaagtacctcggacccttcaacggactcgacaaaggagagccggtcaacgaggcagacgccgcggccctcgagcacggcaaggcctacgaccggcagctcgacagcggagacaacccgtacctcaagtacaaccacgccgacgcggagtttcaggagcgtcttaaagaagatacgtcttttgggggcaacctcggacgagcagtattccaggcgaaaaagagggttcttgaacctctgggcctggttgaggagcctgttaagacggctccgggaaaaaagaggccggtagagcactctcctgtggagccagactcctcctcgggaaccggaaaagcgggccagcagcctgcaagaaaaagattgaattttggtcagactggagacgcagactccgtacctgacccccagcctctcggacagccaccagcagcccccacaagtttgggatctactacaatggctacaggcagtggcgcaccaatggcagacaataacgagggtgccgatggagtgggtaattcctcaggaaattggcattgcgattcccaatggctgggcgacagagtcatcaccaccagcacccgaacctgggccctgcccacctacaacaaccacctctacaagcaaatctccagccaatcaggagcatcgaacgacaaccactactttggccacagcaccccttgggggtattttgacttcaacagattccactgtcacttctccccacgtgactggcaaagactcatcaacaacaactggggattccgacccaagagactcaacttcaagctctttaacattcaagtcaaagaggtcacgcagaatgacggtacgacgacgattgccaataaccttaccagcacggttcaggtgtttactgactcggagtaccagctcccgtacgtcctcggctcggcgcatcaaggatgcctcccgccgttcccagcagacgtcttcatggtcccacagtatggatacctcaccctgaacaacgggagtcaggcggtaggacgctcttccttttactgcctggagtactttccttctcagatgcttcgtaccggaaacaactttaccttcagctacacctttgaagacgtgcctttccacagtagctacgctcacagccagagtctggatcggctgatgaatcctcttatcgaccagtacctgtattatctaaacaaaacacaatcaaatagtggaactcttcagcagtctcggctactgtttagtcaagctggacccaccagcatgtctcttcaagctaaaaactggctgcctggaccttgctacagacaacagcgtctgtcaaagcaggcaaacgacaacaacaacagcaactttccctggactgcggctacaaagtatcatctaaatggccgggactcgttggttaatccaggaccagctatggccagccacaaagacgatgaagaaaagtttttccccatgcatggaaccctgatatttggtaaacaaggaacaaatgctaacgacgcggatttggacaatgtcatgattacagatgaagaagaaatccgcaccaccaatcccgtggctacggagcagtacgggactgtgtcaaataatttgcaaaactcaaatactggtccaactactggaactgtcaatcaccaaggagcgttacctggtatggtgtggcaggatcgagacgtgtacctgcagggacccatttgggccaagattcctcacaccgatggacactttcatccttctccactgatgggaggttttggactcaaacacccgcctcctcagatcatgatcaaaaacactcccgttccagccaatcctcctacaaacttcagttctgccaagtttgcttccttcatcacacagtattccacgggacaagtcagcgtggagattgagtgggagctgcagaaggagaacagcaaacgctggaaccccgagatccagtacacttccaactacaacaaatctgttaatgtggactttactgtggacactaatggcgtgtattcagagcctcgccccattggcaccagatacctgactcgtaatctgtaa

SEQ ID NO: 12976 - DNA, 2208 bp, Artificial Sequence
  source: /note="Description of Artificial Sequence: Synthetic polynucleotide"
atggctgccgatggttatcttccagattggctcgaggacactctctctgaaggaataagacagtggtggaagctcaaacctggcccaccaccgccaaagcccgcagagcggcacaaggacgacagtaggggtcttgtgcttcctgggtacaagtacctcggacccttcaacggactcgacaaaggagagccggtcaacgaggcagacgccgcggccctcgagcacgacaaggcctacgaccggcagctcgacagcggagacaacccgtacctcaagtacaaccacgccgacgcggagtttcaggagcgtcttaaagaagatacgtcttttgggggcaacctcggacgagcagtattccaggcgaaaaagagggttcttgaacctctgggcctggttgaggagcctgttaagacggctccgggaaaaaagaggccggtagagcactctcctgtggagccagactcctcctcgggaaccggaaaagcgggccagcagcctgcaagaaaaagattgaattttggtcagactggagacgcagactccgtacctgacccccagcctctcggacagccaccagcagcccccacaagtttgggatctactacaatggctacaggcagtggcgcaccaatggcagacaataacgagggtgccgatggagtgggtaattcctcaggaaattggcattgcgattcccaatggctgggcgacagagtcatcaccaccagcacccgaacctgggccctgcccacctacaacaaccacctctacaagcaaatctccagccaatcaggagcatcgaacgacaaccactactttggccacagcaccccttgggggtattttgacttcaacagattccactgtcacttctccccacgtgaccggcaaagactcatcaacaacaactggggattccgacccaagagactcaacttcaagctctttaacattcaagtcaaagaggtcacgcagaatgacggtacgacgacgattgccaataaccttaccagcacggttcaggtgtttactgactcggagtaccagctcccgtacgtcctcggctcggcgcatcaaggatgcctcccgccgttcccagcagacgtcttcatggtcccacagtatggatacctcaccctgaacaacgggagtcaggcggtaggacgctcttccttttactgcctggagtactttccttctcagatgcttcgtaccggaaacaactttaccttcagctacacctttgaagacgtgcctttccacagtagctacgctcacagccagagtctggatcggctgatgaatcctcttatcgaccagtacctgtattatctaaacaaaacacaatcaaatagtggaactcttcagcagtctcggctactgtttagtcaagctggacccaccagcatgtctcttcaagctaaaaactggctgcctggaccttgctacagacaacagcgtctgtcaaagcaggcaaacgacaacaacaacagcaactttccctggactgcggctacaaagtatcatctaaatggccgggactcgttggttaatccaggaccagctatggccagccacaaagacgatgaagaaaagtttttccccatgcatggaaccctgatatttggtaaacaaggaacaaatgctaacgacgcggatttggacaatgtcatgattacagatgaagaagaaatccgcaccaccaatcccgtggctacggagcagtacgggactgtgtcaaataatttgcaaaactcaaatactggtccaactactggaactgtcaatcaccaaggagcgttacctggtatggtgtggcaggatcgagacgtgtacctgcagggacccatttgggccaagattcctcacaccgatggacactttcatccttctccactgatgggaggttttggactcaaacacccgcctcctcagatcatgatcaaaaacactcccgttccagccaatcctcctacaaacttcagttctgccaagtttgcttccttcatcacacagtattccacgggacaagtcagcgtggagattgagtgggagctgcagaaggagaacagcaaacgctggaaccccgagatccagtacacttccaactacaacaaatctgttaatgtggactttactgtggacactaatggcgtgtattcagagcctcgccccattggcaccagatacctgactcgtaatctgtaa

SEQ ID NO: 12977 - DNA, 2208 bp, Artificial Sequence
  source: /note="Description of Artificial Sequence: Synthetic polynucleotide"
atggctgccgatggttatcttccagattggctcgaggacactctctctgaaggaataagacagtggtggaagctcaaacctggcccaccaccgccaaagcccgcagagcggcacaaggacgacagtaggggtcttgtgcttcctgggtacaagtacctcggacccttcaacggactcgacaaaggagagccggtcaacgaggcagacgccgcggccctcgagcacgacaaggcctacgaccggcagctcgacagcggagacaacccgtacctcaagtacaaccacgccgacgcggagtttcaggagcgtcttaaagaagatacgtcttttgggggcaacctcggacgagcagtattccaggcgaaaaagagggttcttgaacctctgggcctggttgaggagcctgttaagacggctccgggaaaaaagaggccggtagagcactctcctgtggagccagactcctcctcgggaaccggaaaagcgggccagcagcctgcaagaaaaagattgaattttggtcagactggagacgcagactccgtacctgacccccagcctctcggacagccaccagcagcccccacaagtttgggatctactacaatggctacaggcagtggcgcaccaatggcagacaataacgagggtgccgatggagtgggtaattcctcaggaaattggcattgcgattcccaatggctgggcgacagagtcatcaccaccagcacccgaacctgggccctgcccacctacaacaaccacctctacaagcaaatctccagccaatcaggagcatcgaacgacaaccactactttggccacagcaccccttgggggtattttgacttcaacagattccactgtcacttctccccacgtgactggcaaagactcatcaacaacaactggggattccgacccaagagacccaacttcaagctctttaacattcaagtcaaagaggtcacgcagaatgacggtacgacgacgattgccaataaccttaccagcacggttcaggtgtttactgactcggagtaccagctcccgtacgtcctcggctcggcgcatcaaggatgcctcccgccgttcccagcagacgtcttcatggtcccacagtatggatacctcaccctgaacaacgggagtcaggcggtaggacgctcttccttttactgcctggagtactttccttctcagatgcttcgtaccggaaacaactttaccttcagctacacctttgaagacgtgcctttccacagtagctacgctcacagccagagtctggatcggctgatgaatcctcttatcgaccagtacctgtattatctaaacaaaacacaatcaaatagtggaactcttcagcagtctcggctactgtttagtcaagctggacccaccagcatgtctcttcaagctaaaaactggctgcctggaccttgctacagacaacagcgtctgtcaaagcaggcaaacgacaacaacaacagcaactttccctggactgcggctacaaagtatcatctaaatggccgggactcgttggttaatccaggaccagctatggccagccacaaagacgatgaagaaaagtttttccccatgcatggaaccctgatatttggtaaacaaggaacaaatgctaacgacgcggatttggacaatgtcatgattacagatgaagaagaaatccgcaccaccaatcccgtggctacggagcagtacgggactgtgtcaaataatttgcaaaactcaaatactggtccaactactggaactgtcaatcaccaaggagcgttacctggtatggtgtggcaggatcgagacgtgtacctgcagggacccatttgggccaagattcctcacaccgatggacactttcatccttctccactgatgggaggttttggactcaaacacccgcctcctcagatcatgatcaaaaacactcccgttccagccaatcctcctacaaacttcagttctgccaagtttgcttccttcatcacacagtattccacgggacaagtcagcgtggagattgagtgggagctgcagaaggagaacagcaaacgctggaaccccgagatccagtacacttccaactacaacaaatctgttaatgtggactttactgtggacactaatggcgtgtattcagagcctcgccccattggcaccagatacctgactcgtaatctgtaa

SEQ ID NO: 12978 - DNA, 2208 bp, Artificial Sequence
  source: /note="Description of Artificial Sequence: Synthetic polynucleotide"
atggctgccgatggttatcttccagattggctcgaggacactctctctgaaggaataagacagtggtggaagctcaaacctggcccaccaccgccaaagcccgcagagcggcacaaggacgacagtaggggtcttgtgcttcctgggtacaagtacctcggacccttcaacggactcgacaaaggagagccggtcaacgaggcagacgccgcggccctcgagcacgacaaggcctacgaccggcagctcgacagcggagacaacccgtacctcaagtacaaccacgccgacgcggagtttcaggagcgtcttaaagaagatacgtcttttgggggcaacctcggacgagcagtattccaggcgaaaaagagggttcttgaacctctgggcctggttgaggagcctgttaagacggctccgggaaaaaagaggccggtagagcactctcctgtggagccagactcctcctcgggaaccggaaaagcgggccagcagcctgcaagaaaaagattgaattttggtcagactggagacgcagactccgtacctgacccccagcctctcggacagccaccagcagcccccacaagtttgggatctactacaatggctacaggcagtggcgcaccaatggcagacaataacgagggtgccgatggagtgggtaattcctcaggaaattggcattgcgattcccaatggctgggcgacagagtcatcaccaccagcacccgaacctgggccctgcccacctacaacaaccacctctacaagcaaatctccagccaatcaggagcatcgaacgacaaccactactttggccacagcaccccttgggggtattttgacttcaacagattccactgtcacttctccccacgtgactggcaaagactcatcaacaacaactggggattccgacccaagagactcaacttcaagctctttaacattcaagtcaaagaggtcacgcagaatgacggtacgacgacgattgccaataaccttaccagcacggttcaggtgtttactgactcggagtaccagctcccgtacgtcctcggctcggcgcatcaaggatgcctcccgccgttcccagcagacgtcttcatggtcccacagtatggatacctcaccctgaacaacgggagtcaggcggtaggacgctcttccttttactgcctggagtactttccttctcagatgcttcgtaccggaaacaactttaccttcagctacacctttgaagacgtgcctttccacagtagctacgctcacagccagagtctggatcggctgatgaatcctcttatcgaccagtacctgtattatctaaacaaaacacaatcaaatagtggaactcttcagcagtctcggctactgtttagtcaagctggacccaccagcatgtctcttcaagctaaaaactggctgcctggaccttgctacagacaacagcgtctgtcaaagcaggcaaacgacaacaacaacagcaactttccctggactgcggctacaaagtatcatctaaatggccgggactcgttggttaatccaggaccagctatggccagccacaaagacgatgaagaaaagtttttccccatgcatggaaccctgatatttggtaaacaaggaacaaatgctaacgacgcggatttggacaatgtcatgattacagatgaagaagaaatccgcaccaccaatcccgtggctacggagcagtacgggactgtgtcaaataatttgcaaaactcaaatactggtccaactactggaactgtcaatcaccaaggagcgttacctggtatggtgtggcaggatcgagacgtgtacctgcagggacccatttgggccaagattcctcacaccgatggacactttcatccttctccactgatgggaggttttggactcaaacacccgcctcctcagatcatgatcaaaaacactcccgttccagccaatcctcctacaaacttcagttctgccaagtttgcttccttcatcacacagtattccacgggacaagtcagcgtggagattgagtgggagctgcagaaggagaacagcaaacgctggaaccccgagatccagtacacttccaactacaacaaatctgttaatgtggactttactgtgggcactaatggcgtgtattcagagcctcgccccattggcaccagatacctgactcgtaatctgtaa

SEQ ID NO: 12979 - DNA, 2208 bp, Artificial Sequence
  source: /note="Description of Artificial Sequence: Synthetic polynucleotide"
atggctgccgatggttatcttccagattggctcgaggacactctctctgaaggaataagacagtggtggaagctcaaacctggcccaccaccgccaaagcccgcagagcggcacaaggacgacagtaggggtcttgtgcttcctgggtacaagtacctcggacccttcaacggactcgacaaaggagagccggtcaacgaggcagacgccgcggccctcgagcacgacaaggcctacgaccggcagctcgacagcggagacaacccgtacctcaagtacaaccacgccgacgcggagtttcaggagcgtcttaaagaagatacgtcttttgggggcaacctcggacgagcagtattccaggcgaaaaagagggttcttgaacctctgggcctggttgaggagcctgttaagacggctccgggaaaaaagaggccggtagagcactctcctgtggagccagactcctcctcgggaaccggaaaagcgggccagcagcctgcaagaaaaagattgaattttggtcagactggagacgcagactccgtacctgacccccagcctctcggacagccaccagcagcccccacaagtttgggatctactacaatggctacaggcagtggcgcaccaatggcagacaataacgagggtgccgatggagtgggtaattcctcaggaaattggcattgcgattcccaatggctgggcgacagagtcatcaccaccagcacccgaacctgggccctgcccacctacaacaaccacctctacaagcaaatctccagccaatcaggagcatcgaacgacaaccactactttggccacagcaccccttgggggtattttgacttcaacagattccactgtcacttctccccacgtgactggcaaagactcatcaacaacaactggggattccgacccaagagactcaacttcaagctctttaacattcaagtcaaagaggtcacgcagaatgacggtacgacgacgattgccaataaccttaccagcacggttcaggtgtttactgactcggagtaccagctcccgtacgtcctcggctcggcgcatcaaggatgcctcccgccgttcccagcagacgtcttcatggtcccacagtatggatacctcaccctgaacaacgggagtcaggcggtaggacgctcttccttttactgcctggagtactttccttctcagatgcttcgtaccggaaacaactttaccttcagctacacctttgaagacgtgcctttccacagtagctacgctcacagccagagtctggatcggctgatgaatcctcttatcgaccagtacctgtattatctaaacaaaacacaatcaaatagtggaactcttcagcagtctcggctactgtttagtcaagctggacccaccagcacgtctcttcaagctaaaaactggctgcctggaccttgctacagacaacagcgtctgtcaaagcaggcaaacgacaacaacaacagcaactttccctggactgcggctacaaagtatcatctaaatggccgggactcgttggttaatccaggaccagctatggccagccacaaagacgatgaagaaaagtttttccccatgcatggaaccctgatatttggtaaacaaggaacaaatgctaacgacgcggatttggacaatgtcatgattacagatgaagaagaaatccgcaccaccaatcccgtggctacggagcagtacgggactgtgtcaaataatttgcaaaactcaaatactggtccaactactggaactgtcaatcaccaaggagcgttacctggtatggtgtggcaggatcgagacgtgtacctgcagggacccatttgggccaagattcctcacaccgatggacactttcatccttctccactgatgggaggttttggactcaaacacccgcctcctcagatcatgatcaaaaacactcccgttccagccaatcctcctacaaacttcagttctgccaagtttgcttccttcatcacacagtattccacgggacaagtcagcgtggagattgagtgggagctgcagaaggagaacagcaaacgctggaaccccgagatccagtacacttccaactacaacaaatctgttaatgtggactttactgtggacactaatggcgtgtattcagagcctcgccccattggcaccagatacctgactcgtaatctgtaa

SEQ ID NO: 12980 - DNA, 2208 bp, Artificial Sequence
  source: /note="Description of Artificial Sequence: Synthetic polynucleotide"
atggctgccgatggttatcttccagattggctcgaggacactctctctgaaggaataagacagtggtggaagctcaaacctggcccaccaccgccaaagcccgcagagcggcacaaggacgacagtaggggtcttgtgcttcctgggtacaagtacctcggacccttcaacggactcgacaaaggagagccggtcaacgaggcagacgccgcggccctcgagcacgacaaggcctacgaccggcagctcgacagcggagacaacccgtacctcaagtacaaccacgccgacgcggagtttcaggagcgtcttaaagaagatacgtcttttgggggcaacctcggacgagcagtattccaggcgaaaaagagggttcttgaacctctgggcctggttgaggagcctgttaagacggctccgggaaaaaagaggccggtagagcactctcctgtggagccagactcctcctcgggaaccggaaaagcgggccagcagcctgcaagaaaaagattgaattttggtcagactggagacgcagactccgtacctgacccccagcctctcggacagccaccagcagcccccacaagtttgggatctactacaatggctacaggcagtggcgcaccaatggcagacaataacgagggtgccgatggagtgggtaattcctcaggaaattggcattgcgattcccaatggctgggcgacagagtcatcaccaccagcacccgaacctgggccctgcccacctacaacaaccacctctacaagcaaatctccagccaatcaggagcatcgaacgacaaccactactttggccacagcaccccttgggggtattttgacttcaacagattccactgtcacttctccccacgtgactggcaaagactcatcaacaacaactggggattccgacccaagagactcaacttcaagctctttaacattcaagtcaaagaggtcacgcagaatgacggtacgacgacgattgccaataaccttaccagcacggttcaggtgtttactgactcggagtaccagctcccgtacgtcctcggctcggcgcatcaaggatgcctcccgccgttcccagcagacgtcttcatggtcccacagtatggatacctcaccctgaacaacgggagtcaggcggtaggacgctcttccttttactgcctggagtactttccttctcagatgcttcgtaccggaaacaactttaccttcagctacacctttgaagacgtgcctttccacagtagctacgctcacagccagagtctggatcggctgatgaatcctcttatcgaccagtacctgtattatctaaacaaaacacaatcaaatagtggaactcttcagcagtctcggctactgtttagtcaagctggacccaccagcatgtctcttcaagctaaaaactggctgcctggaccttgctacagacaacagcgtctgtcaaagcaggcaaacgacaacaacaacagcaactttccctggactgcggctacaaagtatcatctaaatggccgggactcgttggttaatccaggaccagctatggccagccacaaagacgatgaagaaaagtttttccccatgcatggaaccctgatatttggtaaacaaggaacaaatgctaacgacgcggatttggacaatgtcatgattacagatgaagaagaaatccgcaccaccaatcccgtggctacggagcagtacgggactgtgtcaaataatttgcaaaactcaaatactggtccaactactggaactatcaatcaccaaggagcgttacctggtatggtgtggcaggatcgagacgtgtacctgcagggacccatttgggccaagattcctcacaccgatggacactttcatccttctccactgatgggaggttttggactcaaacacccgcctcctcagatcatgatcaaaaacactcccgttccagccaatcctcctacaaacttcagttctgccaagtttgcttccttcatcacacagtattccacgggacaagtcagcgtggagattgagtgggagctgcagaaggagaacagcaaacgctggaaccccgagatccagtacacttccaactacaacaaatctgttaatgtggactttactgtggacactaatggcgtgtattcagagcctcgccccattggcaccagatacctgactcgtaatctgtaa

SEQ ID NO: 12981 - DNA, 2208 bp, Artificial Sequence
  source: /note="Description of Artificial Sequence: Synthetic polynucleotide"
atggctgccgatggttatcttccagattggctcgaggacactctctctgaaggaataagacagtggtggaagctcaaacctggcccaccaccgccaaagcccgcagagcggcacaaggacgacagtaggggtcttgtgcttcctgggtacaagtacctcggacccttcaacggactcgacaaaggagagccggtcaacgaggcagacgccgcggccctcgagcacgacaaggcctacgaccggcagctcgacagcggagacaacccgtacctcaagtacaaccacgccgacgcggagtttcaggagcgtcttaaagaagatacgtcttttgggggcaacctcggacgagcagtattccaggcgaaaaagagggttcttgaacctctgggcctggttgaggagcctgttaagacggctccgggaaaaaagaggccggtagagcactctcctgtggagccagactcctcctcgggaaccggaaaagcgggccagcagcctgcaagaaaaagattgaattttggtcagactggagacgcagactccgtacctgacccccagcctctcggacagccaccagcagcccccacaagtttgggatctactacaatggctacaggcagtggcgcaccaatggcagacaataacgagggtgccgatggagtgggtaattcctcaggaaattggcattgcgattcccaatggctgggcgacagagtcatcaccaccagcacccgaacctgggccctgcccacctacaacaaccacctctacaagcaaatctccagccaatcaggagcatcgaacgacaaccactactttggccacagcaccccttgggggtattttgacttcaacagattccactgtcacttctccccacgtgactggcaaagactcatcaacaacaactggggattccgacccaagagactcaacttcaagctctttaacattcaagtcaaagaggtcacgcagaatgacggtacggcgacgattgccaataaccttaccagcacggttcaggtgtttactgactcggagtaccagctcccgtacgtcctcggctcggcgcatcaaggatgcctcccgccgttcccagcagacgtcttcatggtcccacagtatggatacctcaccctgaacaacgggagtcaggcggtaggacgctcttccttttactgcctggagtactttccttctcagatgcttcgtaccggaaacaactttaccttcagctacacctttgaagacgtgcctttccacagtagctacgctcacagccagagtctggatcggctgatgaatcctcttatcgaccagtacctgtattatctaaacaaaacacaatcaaatagtggaactcttcagcagtctcggctactgtttagtcaagctggacccaccagcatgtctcttcaagctaaaaactggctgcctggaccttgctacagacaacagcgtctgtcaaagcaggcaaacgacaacaacaacagcaactttccctggactgcggctacaaagtatcatctaaatggccgggactcgttggttaatccaggaccagctatggccagccacaaagacgatgaagaaaagtttttccccatgcatggaaccctgatatttggtaaacaaggaacaaatgctaacgacgcggatttggacaatgtcatgattacagatgaagaagaaatccgcaccaccaatcccgtggctacggagcagtacgggactgtgtcaaataatttgcaaaactcaaatactggtccaactactggaactgtcaatcaccaaggagcgttacctggtatggtgtggcaggatcgagacgtgtacctgcagggacccatttgggccaagattcctcacaccgatggacactttcatccttctccactgatgggaggttttggactcaaacacccgcctcctcagatcatgatcaaaaacactcccgttccagccaatcctcctacaaacttcagttctgccaagtttgcttccttcatcacacagtattccacgggacaagtcagcgtggagattgagtgggagctgcagaaggagaacagcaaacgctggaaccccgagatccagtacacttccaactacaacaaatctgttaatgtggactttactgtggacactaatggcgtgtattcagagcctcgccccattggcaccagatacctgactcgtaatctgtaa

SEQ ID NO: 12982 - DNA, 2208 bp, Artificial Sequence
  source: /note="Description of Artificial Sequence: Synthetic polynucleotide"
atggctgccgatggttatcttccagattggctcgaggacactctctctgaaggaataagacagtggtggaagctcaaacctggcccaccaccgccaaagcccgcagagcggcacaaggacgacagtaggggtcttgtgcttcctgggtacaagtacctcggacccttcaacggactcgacaaaggagagccggtcaacgaggcagacgccgcggccctcgagcacgacaaggcctacgaccggcagctcgacagcggagacaacccgtacctcaagtacaaccacgccgacgcggagtttcaggagcgtcttaaagaagatacgtcttttgggggcaacctcggacgagcagtattccaggcgaaaaagagggttcttgaacctctgggcctggttgaggagcctgttaagacggctccgggaaaaaagaggccggtagagcactctcctgtggagccagactcctcctcgggaaccggaaaagcgggccagcagcctgcaagaaaaagattgaattttggtcagactggagacgcagactccgtacctgacccccagcctctcggacagccaccagcagcccccacaagtttgggatctactacaatggctacaggcagtggcgcaccaatggcagacaataacgagggtgccgatggagtgggtaattcctcaggaaattggcattgcgattcccaatggctgggcgacagagtcatcaccaccagcacccgaacctgggccctgcccacctacaacaaccacctctacaagcaaatctccagccaatcaggagcatcgaacgacaaccactactttggccacagcaccccttgggggtattttgacttcaacagattccactgtcacttctccccacgtgactggcaaagactcatcaacaacaactggggattccgacccaagagactcaacttcaagctctttaacattcaagtcaaagaggtcacgcagaatgacggtacgacgacgattgccaataaccttaccagcacggttcaggtgtttactgactcggagtaccagctcccgtacgtcctcggctcggcgcatcaaggatgcctcccgccgttcccagcagacgtcttcatggtcccacagtatggatacctcaccctgaacaacgggagtcaggcggtaggacgctcttccttttactgcctggagtactttccttctcagatgcttcgtaccggaaacaactttaccttcagctacacctttgaagacgtgcctttccacagtagctacgctcacagccagagtctggatcggctgatgaatcctcttatcgaccagtacctgtattatctaaacaaaacacaatcaaatagtggaactcttcagcagtctcggctactgtttagtcaagctggacccaccagcatgtctcttcaagctaaaaactggctgcctggaccttgctacagacaacagcgtctgtcaaagcaggcaaacgacaacaacaacagcaactttccctggactgtggctacaaagtatcatctaaatggccgggactcgttggttaatccaggaccagctatggccagccacaaagacgatgaagaaaagtttttccccatgcatggaaccctgatatttggtaaacaaggaacaaatgctaacgacgcggatttggacaatgtcatgattacagatgaagaagaaatccgcaccaccaatcccgtggctacggagcagtacgggactgtgtcaaataatttgcaaaactcaaatactggtccaactactggaactgtcaatcaccaaggagcgttacctggtatggtgtggcaggatcgagacgtgtacctgcagggacccatttgggccaagattcctcacaccgatggacactttcatccttctccactgatgggaggttttggactcaaacacccgcctcctcagatcatgatcaaaaacactcccgttccagccaatcctcctacaaacttcagttctgccaagtttgcttccttcatcacacagtattccacgggacaagtcagcgtggagattgagtgggagctgcagaaggagaacagcaaacgctggaaccccgagatccagtacacttccaactacaacaaatctgttaatgtggactttactgtggacactaatggcgtgtattcagagcctcgccccattggcaccagatacctgactcgtaatctgtaa

SEQ ID NO: 12983 - DNA, 2208 bp, Artificial Sequence
  source: /note="Description of Artificial Sequence: Synthetic polynucleotide"
atggctgccgatggttatcttccagattggctcgaggacactctctctgaaggaataagacagtggtggaagctcaaacctggcccaccaccgccaaagcccgcagagcggcacaaggacgacagtaggggtcttgtgcttcctgggtacaagtacctcggacccttcaacggactcgacaaaggagagccggtcaacgaggcagacgccgcggccctcgagcacgacaaggcctacgaccggcagctcgacagcggagacaacccgtacctcaagtacaaccacgccgacgcggagtttcaggagcgtcttaaagaagatacgtcttttgggggcaacctcggacgagcagtattccaggcgaaaaagagggttcttgaacctctgggcctggttgaggagcctgttaagacggctccgggaaaaaagaggccggtagagcactctcctgtggagccagactcctcctcgggaaccggaaaagcgggccagcagcctgcaagaaaaagattgaattttggtcagactggagacgcagactccgtacctgacccccagcctctcggacagccaccagcagcccccacaagtttgggatctactacaatggctacaggcagtggcgcaccaatggcagacaataacgagggtgccgatggagtgggtaattcctcaggaaattggcattgcgattcccaatggctgggcgacagagtcatcaccaccagcacccgaacctgggccctgcccacctacaacaaccacctctacaagcaaatctccagccaatcaggagcatcgaacgacaaccactactttggccacagcaccccttgggggtattttgacttcaacagattccactgtcacttctccccacgtgactggcaaagactcatcaacaacaactggggattccgacccaagagactcaacttcaagctctttaacattcaagtcaaagaggtcacgcagaatgacggtacgacgacgattgccaataaccttaccagcacggttcaggtgtttactgactcggagtaccagctcccgtacgtcctcggctcggcgcatcaaggatgcctcccgccgttcccagcagacgtcttcatggtcccacagtatggatacctcaccctgaacaacgggagtcaggcggtaggacgctcttccttttactgcctggagtactttccttctcagatgcttcgtaccggaaacaactttaccttcagctacacctttgaagacgtgcctttccacagtagctacgctcacagccagagtctggatcggctgatgaatcctcttatcgaccagtacctgtattatctaaacaaaacacaatcaaatagtggaactcttcagcagtctcggctactgtttagtcaagctggacccaccagcatgtctcttcaagctaaaaactggctgcctggaccttgctacagacaacagcgtctgtcaaagcaggcaaacgacaacaacaacagcaactttccctggactgcggctacaaagtatcatctaaatggccgggactcgttggttaatccaggaccagctatggccagccacaaagacgatgaagaaaagtttttccccatgcatggaaccctgatatttggtaaacaaggaacaaatgctaacgacgcggatttggacaatgtcatgattacagatgaagaagaaatccgcaccaccaatcccgtggctacggagcagtacgggactgtgtcaaataatttgcaaaactcaaatactggtccaactactggaactgtcaatcaccaaggagcgttacctggtatggtgtggcaggatcgagacgtgtacctgcagggacccatttgggccaagattcctcacaccgatggacactttcatccttctccactgatgggaggttttggactcaaacacccgcctcctcagatcatgatcaaaaacactcccgttccagccaatcctcctacaaacttcagttctgccaagtttgcttccttcatcacacagcattccacgggacaagtcagcgtggagattgagtgggagctgcagaaggagaacagcaaacgctggaaccccgagatccagtacacttccaactacaacaaatctgttaatgtggactttactgtggacactaatggcgtgtattcagagcctcgccccattggcaccagatacctgactcgtaatctgtaa

SEQ ID NO: 12984 - DNA, 2208 bp, Artificial Sequence
  source: /note="Description of Artificial Sequence: Synthetic polynucleotide"
atggctgccgatggttatcttccagattggctcgaggacactctctctgaaggaataagacagtggtggaagctcaaacctggcccaccaccgccaaagcccgcagagcggcacaaggacgacggtaggggtcttgtgcttcctgggtacaagtacctcggacccttcaacggactcgacaaaggagagccggtcaacgaggcagacgccgcggccctcgagcacgacaaggcctacgaccggcagctcgacagcggagacaacccgtacctcaagtacaaccacgccgacgcggagtttcaggagcgtcttaaagaagatacgtcttttgggggcaacctcggacgagcagtattccaggcgaaaaagagggttcttgaacctctgggcctggttgaggagcctgttaagacggctccgggaaaaaagaggccggtagagcactctcctgtggagccagactcctcctcgggaaccggaaaagcgggccagcagcctgcaagaaaaagattgaattttggtcagactggagacgcagactccgtacctgacccccagcctctcggacagccaccagcagcccccacaagtttgggatctactacaatggctacaggcagtggcgcaccaatggcagacaataacgagggtgccgatggagtgggtaattcctcaggaaattggcattgcgattcccaatggctgggcgacagagtcatcaccaccagcacccgaacctgggccctgcccacctacaacaaccacctctacaagcaaatctccagccaatcaggagcatcgaacgacaaccactactttggctacagcaccccttgggggtattttgacttcaacagattccactgtcacttctccccacgtgactggcaaagactcatcaacaacaactggggattccgacccaagagactcaacttcaagctctttaacattcaagtcaaagaggtcacgcagaatgacggtacgacgacgattgccaataaccttaccagcacggttcaggtgtttactgactcggagtaccagctcccgtacgtcctcggctcggcgcatcaaggatgcctcccgccgttcccagcagacgtcttcatggtcccacagtatggatacctcaccctgaacaacgggagtcaggcggtaggacgctcttccttttactgcctggagtactttccttctcagatgcttcgtaccggaaacaactttaccttcagctacacctttgaagacgtgcctttccacagtagctacgctcacagccagagtctggatcggctgatgaatcctcttatcgaccagtacctgtattatctaaacaaaacacaatcaaatagtggaactcttcagcagtctcggctactgtttagtcaagctggacccaccagcatgtctcttcaagctaaaaactggctgcctggaccttgctacagacaacagcgtctgtcaaagcaggcaaacgacaacaacaacagcaactttccctggactgcggctacaaagtatcatctaaatggccgggactcgttggttaatccaggaccagctatggccagccacaaagacgatgaagaaaagtttttccccatgcatggaaccctgatatttggtaaacaaggaacaaatgctaacgacgcggatttggacaatgtcatgattacagatgaagaagaaatccgcaccaccaatcccgtggctacggagcagtacgggactgtgtcaaataatttgcaaaactcaaatactggtccaactactggaactgtcaatcaccaaggagcgttacctggtatggtgtggcaggatcgagacgtgtacctgcagggacccatttgggccaagattcctcacaccgatggacactttcatccttctccactgatgggaggttttggactcaaacacccgcctcctcagatcatgatcaaaaacactcccgttccagccaatcctcctacaaacttcagttctgccaagtttgcttccttcatcacacagtattccacaggacaagtcagcgtggagattgagtgggagctgcagaaggagaacagcaaacgctggaaccccgagatccagtacacttccaactacaacaaatctgttaatgtggactttactgtggacactaatggcgtgtattcagagcctcgccccattggcaccagatacctgactcgtaatctgtaa

SEQ ID NO: 12985 - DNA, 2208 bp, Artificial Sequence
  source: /note="Description of Artificial Sequence: Synthetic polynucleotide"
atggctgccgatggttatcttccagattggctcgaggacactctctctgaaggaataagacagtggtggaagctcaaacctggcccaccaccgccaaagcccgcagagcggcacaaggacgacagtaggggtcttgtgcttcctgggtacaagtacctcggacccttcaacggactcgacaaaggagagccggtcaacgaggcagacgccgcggccctcgagcacgacaaggcctacgaccggcagctcgacagcggagacaacccgtacctcaagtacaaccacgccgacgcggagcttcaggagcgtcttaaagaagatacgtcttttgggggcaacctcggacgagcagtattccaggcgaaaaagagggttcttgaacctctgggcctggttgaggagcctgttaagacggctccgggaaaaaagaggccggtagagcactctcctgtggagccagactcctcctcgggaaccggaaaagcgggccagcagcctgcaagaaaaagattgaattttggtcagactggagacgcagactccgtacctgacccccagcctctcggacagccaccagcagcccccacaagtttgggatctactacaatggctacaggcagtggcgcaccaatggcagacaataacgagggtgccgatggagtgggtaattcctcaggaaattggcattgcgattcccaatggctgggcgacagagtcatcaccaccagcacccgaacctgggccctgcccacctacaacaaccacctctacaagcaaatctccagccaatcaggagcatcgaacgacaaccactactttggctacagcaccccttgggggtattttgacttcaacagattccactgtcacttctccccacgtgactggcaaagactcatcaacaacaactggggattccgacccaagagactcaacttcaagctctttaacattcaagtcaaagaggtcacgcagaatgacggtacgacgacgattgccaataaccttaccagcacggttcaggtgtttactgactcggagtaccagctcccgtacgtcctcggctcggcgcatcaaggatgcctcccgccgttcccagcagacgtcttcatggtcccacagtatggatacctcaccctgaacaacgggagtcaggcggtaggacgctcttccttttactgcctggagtactttccttctcagatgcttcgtaccggaaacaactttaccttcagctacacctttgaagacgtgcctttccacagtagctacgctcacagccagagtctggatcggctgatgaatcctcttatcgaccagtacctgtattatctaaacaaaacacaatcaaatagtggaactcttcagcagtctcggctactgtttagtcaagctggacccaccagcatgtctcttcaagctaaaaactggctgcctggaccttgctacagacaacagcgtctgtcaaagcaggcaaacgacaacaacaacagcaactttccctggactgcggctacaaagtatcatctaaatggccgggactcgttggttaatccaggaccagctatggccagccacaaagacgatgaagaaaagtttttccccatgcatggaaccctgatatttggtaaacaaggaacaaatgctaacgacgcggatttggacaatgtcatgattacagatgaagaagaaatccgcaccaccaatcccgtggctacggagcagtacgggactgtgtcaaataatttgcaaaactcaaatactggtccaactactggaactgtcaatcaccaaggagcgttacctggtatggtgtggcaggatcgagacgtgtacctgcagggacccatttgggccaagattcctcacaccgatggacactttcatccttctccactgatgggaggttttggactcaaacacccgcctcctcagatcatgatcaaaaacactcccgttccagccaatcctcctacaaacttcagttctgccaagtttgcttccttcatcacacagtattccacaggacaagtcagcgtggagattgagtgggagctgcagaaggagaacagcaaacgctggaaccccgagatccagtacacttccaactacaacaaatctgttaatgtggactttactgtggacactaatggcgtgtattcagagcctcgccccattggcaccagatacctgactcgtaatctgtaa

SEQ ID NO: 12986 - DNA, 2208 bp, Artificial Sequence
  source: /note="Description of Artificial Sequence: Synthetic polynucleotide"
atggctgccgatggttatcttccagattggctcgaggacactctctctgaaggaataagacagtggtggaagctcaaacctggcccaccaccgccaaagcccgcagagcggcacaaggacgacagtaggggtcttgtgcttcctgggtacaagtacctcggacccttcaacggactcgacaaaggagagccggtcaacgaggcagacgccgcggccctcgagcacgacaaggcctacgaccggcagctcgacagcggagacaacccgtacctcaagtacaaccacgccgacgcggagtttcaggagcgtcttaaagaagatacgtcttttgggggcaacctcggacgagcagtattccaggcgaaaaagagggttcttgaacctctgggcctggttgaggagcctgttaagacggctccgggaaaaaagaggccggtagagcactctcctgtggagccagactcctcctcgggaaccggaaaagcgggccagcagcctgcaagaaaaagattgaattttggtcagactggagacgcagactccgtacctgacccccagcctctcggacagccaccagcagcccccacaagtttgggatctactacaatggctacaggcagtggcgcaccaatggcagacaataacgagggtgccgatggagtgggtaattcctcaggaaattggcattgcgattcccaatggctgggcgacagagtcatcaccaccagcacccgaacctgggccctgcccacctacaacaaccacctctacaagcaaatctccagccaatcaggagcatcgaacgacaaccactactttggctacagcaccccttgggggtattttgacttcaacagattccactgtcacttctccccacgtgactggcaaagactcatcaacaacaactggggattccgacccaagagactcaacttcaagctctttaacattcaagtcaaagaggtcacgcagaatgacggtacgacgacgattgccaataaccttaccagcacggttcaggtgtttactgactcggagtaccagctcccgtacgtcctcggctcggcgcatcaaggatgcctcccgccgttcccagcagacgtcttcatggtcccacagtatggatacctcaccctgaacaacgggagtcaggcggtaggacgctcttccttttactgcctggagtactttccttctcagatgcttcgtaccggaaacaactttaccttcagctacacctttgaagacgtgcctttccacagtagctacgctcacagccagagtctggatcggctgatgaatcctcttatcgaccagtacctgtattatctaaacaaaacacaatcaaatagtggaactcttcagcagtctcggctactgtttagtcaagctggacccaccagcatgtctcttcaagctaaaaactggctgcctggaccttgctacagacaacagcgtctgtcaaagcaggcaaacgacaacaacaacagcaactttccctggactgcggctacaaagtatcatctaaatggccgggactcgttggttaatccaggaccagctatggccagccacaaagacgatgaagaaaagtttttccccatgcatggaaccctgatatttggtaaacaaggaacaaatgctaacgacgcggatttggacaatgtcatgattacagatgaagaagaaatccgcaccaccaatcccgtggctacggagcagtacgggactgtgtcaaataatttgcaaaactcaaatactggtccaactactggaactgtcaatcaccaaggagcgttacctggtatggtgtggcaggatcgagacgtgtacctgcagggacccatttgggccaagattcctcacaccgatggacactttcatccttctccactggtgggaggttttggactcaaacacccgcctcctcagatcatgatcaaaaacactcccgttccagccaatcctcctacaaacttcagttctgccaagtttgcttccttcatcacacagtattccacaggacaagtcagcgtggagattgagtgggagctgcagaaggagaacagcaaacgctggaaccccgagatccagtacacttccaactacaacaaatctgttaatgtggactttactgtggacactaatggcgtgtattcagagcctcgccccattggcaccagatacctgactcgtaatctgtaa

SEQ ID NO: 12987 - DNA, 2208 bp, Artificial Sequence
  source: /note="Description of Artificial Sequence: Synthetic polynucleotide"
atggctgccgatggttatcttccagattggctcgaggacactctctctgaaggaataagacagtggtggaagctcaaacctggcccaccaccgccaaagcccgcagagcggcacaaggacgacagtaggggtcttgtgcttcctgggtacaagtacctcggacccttcaacggactcgacaaaggagagccggtcaacgaggcagacgccgcggccctcgagcacgacaaggcctacgaccggcagctcgacagcggagacaacccgtacctcaagtacaaccacgccgacgcggagtttcaggagcgtcttaaagaagatacgtcttttgggggcaacctcggacgagcagtattccaggcgaaaaagagggttcttgaacctctgggcctggttgaggagcctgttaagacggctccgggaaaaaagaggccggtagagcactctcctgtggagccagactcctcctcgggaaccggaaaagcgggccagcagcctgcaagaaaaagattgaattttggtcagactggagacgcagactccgtacctgacccccagcctctcggacagccaccagcagcccccacaagtttgggatctactacaatggctacaggcagtggcgcaccaatggcagacaataacgagggtgccgatggagtgggtaattcctcaggaaattggcattgcgattcccaatggctgggcgacagagtcatcaccaccagcacccgaacctgggccctgcccacctacaacaaccacctctacaagcaaatctccagccaatcaggagcatcgaacgacaaccactactttggctacagcaccccttgggggtattttgacttcaacagattccactgtcacttctccccacgtgactggcaaagactcatcaacaacaactggggattccgacccaagagactcaacttcaagctctttaacattcaagtcaaagaggtcacgcagaatgacggtacgacgacgattgccaataaccttaccagcacggttcaggtgtttactgactcggagtaccagctcccgtacgtcctcggctcggcgcatcaaggatgcctcccgccgttcccagcagacgtcttcatggtcccacagtatggatacctcaccctgaacaacgggagtcaggcggtaggacgctcttccttttactgcctggagtactttccttctcagatgcttcgtaccggaaacaactttaccttcagctacacctttgaagacgtgcctttccacagtagctacgctcacagccagagtctggatcggctgatgaatcctcttatcgaccagtacctgtattatctaaacaaaacacaatcaaatagtggaactcttcagcagtctcggctactgtttagtcaagctggacccaccagcatgtctcttcaagctaaaaactggctgcctggaccttgctacagacaacagcgtctgtcaaagcaggcaaacgacaacaacaacagcaactttccctggactgcggctacaaagtatcatctaaatggccgggactcgttggttaatccaggaccagctatggccagccacaaagacgatgaagaaaagtttttccccatgcatggaaccctgatatttggtaaacaaggaacaaatgctaacgacgcggatttggacaatgtcatgattacagatgaagaagaaatccgcaccaccaatcccgtggctacggagcagtacgggactgtgtcaaataatttgcaaaactcaaatactggtccaactactggaactgtcaatcaccaaggagcgttacctggtatggtgtggcaggatcgagacgtgtacctgcagggacccatttgggccaagattcctcacaccgatggacactttcatccttctccactgatgggaggttttggactcaaacacccgcctcctcagatcatgatcaaaaacactcccgttccagccaatcctcctacaaacttcagttctgccaagtttgcttccttcatcacacagtattccacaggacaagtcggcgtggagattgagtgggagctgcagaaggagaacagcaaacgctggaaccccgagatccagtacacttccaactacaacaaatctgttaatgtggactttactgtggacactaatggcgtgtattcagagcctcgccccattggcaccagatacctgactcgtaatctgtaa

SEQ ID NO: 12988 - DNA, 2208 bp, Artificial Sequence
  source: /note="Description of Artificial Sequence: Synthetic polynucleotide"
atggctgccgatggttatcttccagattggctcgaggacactctctctgaaggaataagacagtggtggaagctcaaacctggcccaccaccgccaaagcccgcagagcggcacaaggacgacagtaggggtcttgtgcttcctgggtacaagtacctcggacccttcaacggactcgacaaaggagagccggtcaacgaggcagacgccgcggccctcgagcacgacaaggcctacgaccggcagctcgacagcggagacaacccgtacctcaagtacaaccacgccgacgcggagtttcaggagcgtcttaaagaagatacgtcttttgggggcaacctcggacgagcagtattccaggcgaaaaagagggttcttgaacctctgggcctggttgaggagcctgttaagacggctccgggaaaaaagaggccggtagagcactctcctgtggagccagactcctcctcgggaaccggaaaagcgggccagcagcctgcaagaaaaagattgaattttggtcagactggagacgcagactccgtacctgacccccagcctctcggacagccaccagcagcccccacaagtttgggatctactacaatggctacaggcagtggcgcaccaatggcagacaataacgagggtgccgatggagtgggtaattcctcaggaaattggcattgcgattcccaatggctgggcgacagagtcatcaccaccagcacccgaacctgggccctgcccacctacaacaaccacctctacaagcaaatctccagccaatcaggagcatcgaacgacaaccactactttggctacagcaccccttgggggtattttgacttcaacagattccactgtcacttctccccacgtgactggcaaagactcatcaacaacaactggggattccgacccaagagactcaacttcaagctctttaacattcaagtcaaagaggtcacgcagaatgacggtacgacgacgattgccaataaccttaccagcacggttcaggtgtttactgactcggagtaccagcccccgtacgtcctcggctcggcgcatcaaggatgcctcccgccgttcccagcagacgtcttcatggtcccacagtatggatacctcaccctgaacaacgggagtcaggcggtaggacgctcttccttttactgcctggagtactttccttctcagatgcttcgtaccggaaacaactttaccttcagctacacctttgaagacgtgcctttccacagtagctacgctcacagccagagtctggatcggctgatgaatcctcttatcgaccagtacctgtattatctaaacaaaacacaatcaaatagtggaactcttcagcagtctcggctactgtttagtcaagctggacccaccagcatgtctcttcaagctaaaaactggctgcctggaccttgctacagacaacagcgtctgtcaaagcaggcaaacgacaacaacaacagcaactttccctggactgcggctacaaagtatcatctaaatggccgggactcgttggttaatccaggaccagctatggccagccacaaagacgatgaagaaaagtttttccccatgcatggaaccctgatatttggtaaacaaggaacaaatgctaacgacgcggatttggacaatgtcatgattacagatgaagaagaaatccgcaccaccaatcccgtggctacggagcagtacgggactgtgtcaaataatttgcaaaactcaaatactggtccaactactggaactgtcaatcaccaaggagcgttacctggtatggtgtggcaggatcgagacgtgtacctgcagggacccatttgggccaagattcctcacaccgatggacactttcatccttctccactgatgggaggttttggactcaaacacccgcctcctcagatcatgatcaaaaacactcccgttccagccaatcctcctacaaacttcagttctgccaagtttgcttccttcatcacacagtattccacgggacaagtcagcgtggagattgagtgggagctgcagaaggagaacagcaaacgctggaaccccgagatccagtacacttccaactacaacaaatctgttaatgtggactttactgtggacactaatggcgtgtattcagagcctcgccccattggcaccagatacctgactcgtaatctgtaa

SEQ ID NO: 12989 - DNA, 2208 bp, Artificial Sequence
  source: /note="Description of Artificial Sequence: Synthetic polynucleotide"
atggctgccgatggttatcttccagattggctcgaggacactctctctgaaggaataagacagtggtggaagctcaaacctggcccaccaccgccaaagcccgcagagcggcacaaggacgacagtaggggtcttgtgcttcctgggtacaagtacctcggacccttcaacggactcgacaaaggagagccggtcaacgaggcagacgccgcggccctcgagcacgacaaggcctacgaccggcagctcgacagcggagacaacccgtacctcaagtacaaccacgccgacgcggagtttcaggagcgtcttaaagaagatacgtcttttgggggcaacctcggacgagcagtattccaggcgaaaaagagggttcttgaacctctgggcctggttgaggagcctgttaagacggctccgggaaaaaagaggccggtagagcactctcctgtggagccagactcctcctcgggaaccggaaaagcgggccagcagcctgcaagaaaaagattgaattttggtcagactggagacgcagactccgtacctgacccccagcctctcggacagccaccagcagcccccacaagtttgggatctactacaatggctacaggcagtggcgcaccaatggcagacaatgacgagggtgccgatggagtgggtaattcctcaggaaattggcattgcgattcccaatggctgggcgacagagtcatcaccaccagcacccgaacctgggccctgcccacctacaacaaccacctctacaagcaaatctccagccaatcaggagcatcgaacgacaaccactactttggctacagcaccccttgggggtattttgacttcaacagattccactgtcacttctccccacgtgactggcaaagactcatcaacaacaactggggattccgacccaagagactcaacttcaagctctttaacattcaagtcaaagaggtcacgcagaatgacggtacgacgacgattgccaataaccttaccagcacggttcaggtgtttactgactcggagtaccagctcccgtacgtcctcggctcggcgcatcaaggatgcctcccgccgttcccagcagacgtcttcatggtcccacagtatggatacctcaccctgaacaacgggagtcaggcggtaggacgctcttccttttactgcctggagtactttccttctcagatgcttcgtaccggaaacaactttaccttcagctacacctttgaagacgtgcctttccacagtagctacgctcacagccagagtctggatcggctgatgaatcctcttatcgaccagtacctgtattatctaaacaaaacacaatcaaatagtggaactcttcagcagtctcggctactgtttagtcaagctggacccaccagcatgtctcttcaagctaaaaactggctgcctggaccttgctacagacaacagcgtctgtcaaagcaggcaaacgacaacaacaacagcaactttccctggactgcggctacaaagtatcatctaaatggccgggactcgttggttaatccaggaccagctatggccagccacaaagacgatgaagaaaagtttttccccatgcatggaaccctgatatttggtaaacaaggaacaaatgctaacgacgcggatttggacaatgtcatgattacagatgaagaagaaatccgcaccaccaatcccgtggctacggagcagtacgggactgtgtcaaataatttgcaaaactcaaatactggtccaactactggaactgtcaatcaccaaggagcgttacctggtatggtgtggcaggatcgagacgtgtacctgcagggacccatttgggccaagattcctcacaccgatggacactttcatccttctccactgatgggaggttttggactcaaacacccgcctcctcagatcatgatcaaaaacactcccgttccagccaatcctcctacaaacttcagttctgccaagtttgcttccttcatcacacagtattccacaggacaagtcagcgtggagattgagtgggagctgcagaaggagaacagcaaacgctggaaccccgagatccagtacacttccaactacaacaaatctgttaatgtggactttactgtggacactaatggcgtgtattcagagcctcgccccattggcaccagatacctgactcgtaatctgtaa

SEQ ID NO: 12990 - DNA, 2208 bp, Artificial Sequence
  source: /note="Description of Artificial Sequence: Synthetic polynucleotide"
atggctgccgatggttatcttccagattggctcgaggacactctctctgaaggaataagacagtggtggaagctcaaacctggcccaccaccgccaaagcccgcagagcggcacaaggacgacagtaggggtcttgtgcttcctgggtacaagtacctcggacccttcaacggactcgacaaaggagagccggtcaacgaggcagacgccgcggccctcgagcacgacaaggcctacgaccggcagctcgacagcggagacaacccgtacctcaagtacaaccacgccgacgcggagtttcaggagcgtcttaaagaagatacgtcttttgggggcaacctcggacgagcagtattccaggcgaaaaagagggttcttgaacctctgggcctggttgaggagcctgttaagacggctccgggaaaaaagaggccggtagagcactctcctgtggagccagactcctcctcgggaaccggaaaagcgggccagcagcctgcaagaaaaagattgaattttggtcagactggagacgcagactccgtacctgacccccagcctctcggacagccaccagcagcccccacaagtttgggatctactacaatggctacaggcagtggcgcaccaatggcagacaataacgagggtgccgatggagtgggtaattcctcaggaaattggcattgcgattcccaatggctgggcgacagagtcatcaccaccagcacccgaacctgggccctgcccacctacaacaaccacctctacaagcaaatctccagccaatcaggagcatcgaacgacaaccactactttggctacagcaccccttgggggtattttgacttcaacagattccactgtcacttctccccacgtgactggcaaagactcatcaacaacaactggggattccgacccaagagactcaacttcaagctctttaacattcaagtcaaagaggtcacgcagaatgacggtacgacgacgattgccaataaccttaccagcacggttcaggtgtttactgactcggagtaccagctcccgtacgtcctcggctcggcgcatcaaggatgcctcccgccgttcccagcagacgtcttcatggtcccacagtatggatacctcaccctgaacaacgggagtcaggcggtaggacgctcttccttttactgcctggagtactttccttctcagatgcttcgtaccggaaacaactttaccttcagctacacctttgaagacgtgcctttccacagtagctacgctcacagccagagtctggatcggctgatgaatcctcttatcgaccagtacctgtattatctaaacaaaacacaatcaaatagtggaactcttcagcagtctcggctactgtttagtcaagctggacccaccagcatgtctcttcaagctaaaaactggctgcctggaccttgctacagacaacagcgtctgccaaagcaggcaaacgacaacaacaacagcaactttccctggactgcggctacaaagtatcatctaaatggccgggactcgttggttaatccaggaccagctatggccagccacaaagacgatgaagaaaagtttttccccatgcatggaaccctgatatttggtaaacaaggaacaaatgctaacgacgcggatttggacaatgtcatgattacagatgaagaagaaatccgcaccaccaatcccgtggctacggagcagtacgggactgtgtcaaataatttgcaaaactcaaatactggtccaactactggaactgtcaatcaccaaggagcgttacctggtatggtgtggcaggatcgagacgtgtacctgcagggacccatttgggccaagattcctcacaccgatggacactttcatccttctccactgatgggaggttttggactcaaacacccgcctcctcagatcatgatcaaaaacactcccgttccagccaatcctcctacaaacttcagttctgccaagtttgcttccttcatcacacagtattccacgggacaagtcagcgtggagattgagtgggagctgcagaaggagaacagcaaacgctggaaccccgagatccagtacacttccaactacaacaaatctgttaatgtggactttactgtggacactaatggcgtgtattcagagcctcgccccattggcaccagatacctgactcgtaatctgtaa

SEQ ID NO: 12991 - DNA, 2208 bp, Artificial Sequence
  source: /note="Description of Artificial Sequence: Synthetic polynucleotide"
atggctgccgatggttatcttccagattggctcgaggacactctctctgaaggaataagacagtggtggaagctcaaacctggcccaccaccgccaaagcccgcagagcggcacaaggacgacagtaggggtcttgtgcttcctgggtacaagtacctcggacccttcaacggactcgacaaaggagagccggtcaacgaggcagacgccgcggccctcgagcacgacaaggcctacgaccggcagctcgacagcggagacaacccgtacctcaagtacaaccacgccgacgcggagtttcaggagcgtcttaaagaagatacgtcttttgggggcaacctcggacgagcagtattccaggcgaaaaagagggttcttgaacctctgggcctggttgaggagcctgttaagacggctccgggaaaaaagaggccggtagagcactctcctgtggagccagactcctcctcgggaaccggaaaagcgggccagcagcctgcaagaaaaagattgaattttggtcagactggagacgcagactccgtacctgacccccagcctctcggacagccaccagcagcccccacaagtttgggatctactacaatggctacaggcagtggcgcaccaatggcagacaataacgagggtgccgatggagtgggtaattcctcaggaaattggcattgcgattcccaatggctgggcgacagagtcatcaccaccagcacccgaacctgggccctgcccacctacaacaaccacctctacaagcaaatctccagccaatcaggagcatcgaacgacaaccactactttggctacagcaccccttgggggtattttgacttcaacagattccactgtcacttctccccacgtgactggcaaagactcatcaacaacaactggggattccgacccaagagactcaacttcaagctctttaacattcaagtcaaagaggtcacgcagaatgacggtacgacgacgattgccaataaccttaccagcacggttcaggtgtttactgactcggagtaccagctcccgtacgtcctcggctcggcgcatcaaggatgcctcccgccgttcccagcagacgtcttcatggtcccacagtatggatacctcaccctgaacaacgggagtcaggcggtaggacgctcttccttttactgcctggagtactttccttctcagatgcttcgtaccggaaacaactttaccttcagctacacctttgaagacgtgcctttccacagtagctacgctcacagccagagtctggatcggctgatgaatcctcttatcgaccagtacctgtattatctaaacaaaacacaatcaaatagtggaactcttcagcagtctcggctactgtttagtcaagctggacccaccagcatgtctcttcaagctaaaaactggctgcctggaccttgctacagacaacagcgtctgtcaaagcaggcaaacgacaacaacaacagcaactttccctggactgcggctacaaagtatcatctaaatggccgggactcgttggttaatccaggaccagctatggccagccacaaagacgatgaagaaaagtttttccccatgcatggaaccctgatatttggtaaacaaggaacaaatgctaacgacgcggatttggacaatgtcatgattacagatgaagaagaaatccgcaccaccaatcccgtggctacggagcagtacgggactgtgtcaaataatttgcaaaactcaaatactggtccaactactggaactgtcaatcaccaaggagcgttacctggtatggtgtggcaggatcgagacgtgtacctgcagggacccatttgggccaagattcctcacaccgatggacactttcatccttctccactgatgggaggttttggactcaaacacccgcctcctcagatcatgatcaaaaacactcccgttccagccaatcctcctacaaacctcagttctgccaagtttgcttccttcatcacacagtattccacgggacaagtcagcgtggagattgagtgggagctgcagaaggagaacagcaaacgctggaaccccgagatccagtacacttccaactacaacaaatctgttaatgtggactttactgtggacactaatggcgtgtattcagagcctcgccccattggcaccagatacctgactcgtaatctgtaa

SEQ ID NO: 12992 - DNA, 2208 bp, Artificial Sequence
  source: /note="Description of Artificial Sequence: Synthetic polynucleotide"
atggctgccgatggttatcttccagattggctcgaggacactctctctgaaggaataagacagtggtggaagctcaaacctggcccaccaccgccaaagcccgcagagcggcacaaggacgacagtaggggtcttgtgcttcctgggtacaagtacctcggacccttcaacggactcgacaaaggagagccggtcaacgaggcagacgccgcggccctcgagcacgacaaggcctacgaccggcagctcgacagcggagacaacccgtacctcaagtacaaccacgccgacgcggagtttcaggagcgtcttaaagaagatacgtcttttgggggcaacctcggacgagcagtattccaggcgaaaaagagggttcttgaacctctgggcctggttgaggagcctgttaagacggctccgggaaaaaagaggccggtagagcactctcctgtggagccagactcctcctcgggaaccggaaaagcgggccagcagcctgcaagaaaaagattgaattttggtcagactggagacgcagactccgtacctgacccccagcctctcggacagccaccagcagcccccacaagtttgggatctactacaatggctacaggcagtggcgcaccaatggcagacaataacgagggtgccgatggagtgggtaattcctcaggaaattggcattgcgattcccaatggctgggcgacagagtcatcaccaccagcacccgaacctgggccctgcccacctacaacaaccacctctacaagcaaatctccagccaatcaggagcatcgaacgacaaccactactttggctacagcaccccttgggggtattttgacttcaacagattccactgtcacttctccccacgtgactggcaaagactcatcaacaacaactggggattccgacccaagagactcaacttcaagctctttaacattcaagtcaaagaggtcacgcagaatgacggtacgacgacgattgccaataaccttaccagcacggttcaggtgtttactgactcggagtaccagctcccgtacgtcctcggctcggcgcatcaaggatgcctcccgccgttcccagcagacgtcttcatggtcccacagtatggatacctcaccccgaacaacgggagtcaggcggtaggacgctcttccttttactgcctggagtactttccttctcagatgcttcgtaccggaaacaactttaccttcagctacacctttgaagacgtgcctttccacagtagctacgctcacagccagagtctggatcggctgatgaatcctcttatcgaccagtacctgtattatctaaacaaaacacaatcaaatagtggaactcttcagcagtctcggctactgtttagtcaagctggacccaccagcatgtctcttcaagctaaaaactggctgcctggaccttgctacagacaacagcgtctgtcaaagcaggcaaacgacaacaacaacagcaactttccctggactgcggctacaaagtatcatctaaatggccgggactcgttggttaatccaggaccagctatggccagccacaaagacgatgaagaaaagtttttccccatgcatggaaccctgatatttggtaaacaaggaacaaatgctaacgacgcggatttggacaatgtcatgattacagatgaagaagaaatccgcaccaccaatcccgtggctacggagcagtacgggactgtgtcaaataatttgcaaaactcaaatactggtccaactactggaactgtcaatcaccaaggagcgttacctggtatggtgtggcaggatcgagacgtgtacctgcagggacccatttgggccaagattcctcacaccgatggacactttcatccttctccactgatgggaggttttggactcaaacacccgcctcctcagatcatgatcaaaaacactcccgttccagccaatcctcctacaaacttcagttctgccaagtttgcttccttcatcacacagtattccacaggacaagtcagcgtggagattgagtgggagctgcagaaggagaacagcaaacgctggaaccccgagatccagtacacttccaactacaacaaatctgttaatgtggactttactgtggacactaatggcgtgtattcagagcctcgccccattggcaccagatacctgactcgtaatctgtaa

SEQ ID NO: 12993 - DNA, 2208 bp, Artificial Sequence
  source: /note="Description of Artificial Sequence: Synthetic polynucleotide"
atggctgccgatggttatcttccagattggctcgaggacactctctctgaaggaataagacagtggtggaagctcaaacctggcccaccaccgccaaagcccgcagagcggcacaaggacgacagtaggggtcttgtgcttcctgggtacaagtacctcggacccttcaacggactcgacaaaggagagccggtcaacgaggcagacgccgcggccctcgagcacgacaaggcctacgaccggcagctcgacagcggagacaacccgtacctcaagtacaaccacgccgacgcggagtttcaggagcgtcttaaagaagatacgtcttttgggggcaacctcggacgagcagtattccaggcgaaaaagagggttcttgaacctctgggcctggttgaggagcctgttaagacggctccgggaaaaaagaggccggtagagcactctcctgtggagccagactcctcctcgggaaccggaaaagcgggccagcagcctgcaagaaaaagattgaattttggtcagactggagacgcagactccgtacctgacccccagcctctcggacagccaccagcagcccccacaagtttgggatctactacaatggctacaggcagtggcgcaccaatggcagacaataacgagggtgccgatggagtgggtaattcctcaggaaattggcattgcgattcccaatggctgggcgacagagtcatcaccaccagcacccgaacctgggccctgcccacctacaacaaccacctctacaagcaaatctccagccaatcaggagcatcgaacgacaaccactactttggctacagcaccccttgggggtattttgacttcaacagattccactgtcacttctccccacgtgactggcaaagactcatcaacaacaactggggattccgacccaagagactcaacttcaagctctttaacattcaagtcaaagaggtcacgcagaatgacggtacgacgacgattgccaataaccttaccagcacggttcaggtgtttactgactcggagtaccagctcccgtacgtcctcggctcggcgcatcaaggatgcctcccgccgttcccagcagacgtcttcatggtcccacagtatggatacctcaccctgaacaacgggagtcaggcggtaggacgctcttccttttactgcctggagtactttccttctcagatgcttcgtaccggaaacaactttaccttcagctacacctttgaagacgtgcctttccacagtagctacgctcacagccagagtctggatcggctgatgaatcctcttatcgaccagtacctgtattatctaaacaaaacacaatcaaatagtggaactcttcggcagtctcggctactgtttagtcaagctggacccaccagcatgtctcttcaagctaaaaactggctgcctggaccttgctacagacaacagcgtctgtcaaagcaggcaaacgacaacaacaacagcaactttccctggactgcggctacaaagtatcatctaaatggccgggactcgttggttaatccaggaccagctatggccagccacaaagacgatgaaggaaagtttttccccatgcatggaaccctgatatttggtaaacaaggaacaaatgctaacgacgcggatttggacaatgtcatgattacagatgaagaagaaatccgcaccaccaatcccgtggctacggagcagtacgggactgtgtcaaataatttgcaaaactcaaatactggtccaactactggaactgtcaatcaccaaggagcgttacctggtatggtgtggcaggatcgagacgtgtacctgcagggacccatttgggccaagattcctcacaccgatggacactttcatccttctccactgatgggaggttttggactcaaacacccgcctcctcagatcatgatcaaaaacactcccgttccagccaatcctcctacaaacttcagttctgccaagtttgcttccttcatcacacagtattccacaggacaagtcagcgtggagattgagtgggagctgcagaaggagaacagcaaacgctggaaccccgagatccagtacacttccaactacaacaaatctgttaatgtggactttactgtggacactaatggcgtgtattcagagcctcgccccattggcaccagatacctgactcgtaatctgtaa

SEQ ID NO: 12994 - DNA, 2208 bp, Artificial Sequence
  source: /note="Description of Artificial Sequence: Synthetic polynucleotide"
atggctgccgatggttatcttccagattggctcgaggacactctctctgaaggaataagacagtggtggaagctcaaacctggcccaccaccgccaaagcccgcagagcggcacaaggacgacagtaggggtcttgtgcttcctgggtacaagtacctcggacccttcaacggactcgacaaaggagagccggtcaacgaggcagacgccgcggccctcgagcacgacaaggcctacgaccggcagctcgacagcggagacaacccgtacctcaagtacaaccacgccgacgcggagtttcaggagcgtcttaaagaagatacgtcttttgggggcaacctcggacgagcagtattccaggcgaaaaagagggttcttgaacctctgggcctggttgaggagcctgttaagacggctccgggaaaaaagaggccggtagagcactctcctgtggagccagactcctcctcgggaaccggaaaagcgggccagcagcctgcaagaaaaagattgaattttggtcagactggagacgcagactccgtacctgacccccagcctctcggacagccaccagcagcccccacaagtttgggatctactacaatggctacaggcagtggcgcaccaatggcagacaataacgagggtgccgatggagtgggtaattcctcaggaaattggcattgcgattcccaatggctgggcgacagagtcatcaccaccagcacccgaacctgggccctgcccacctacaacaaccacctctacaagcaaatctccagccaatcaggagcatcgaacgacaaccactactttggctacagcaccccttgggggtattttgacttcaacagattccactgtcacttctccccacgtgactggcaaagactcatcaacaacaactggggattccgacccaagagactcaacttcaagctctttaacattcaagtcaaagaggtcacgcagaatgacggtacgacgacgattgccaataaccttaccagcacggttcaggtgtttactgactcggagtaccagctcccgtacgtcctcggctcggcgcatcaaggatgcctcccgccgttcccagcagacgtcttcatggtcccacagtatggatacctcaccctgaacaacgggagtcaggcggtaggacgctcttccttttactgcctggagtactttccttctcagatgcttcgtaccggaaacaactttaccttcagctacacctttgaagacgtgcctttccacagtagctacgctcacagccagagtctggatcggctgatgaatcctcttatcgaccagtacctgtattatctaaacaaaacacaatcaaatagtggaactcttcagcagtctcggctactgtttagtcaagctggacccaccagcatgtctcttcaagctaaaaactggctgcctggaccttgctacagacaacagcgtctgtcaaagcaggcaaacgacaacaacaacagcaactttccctggactgcggctacaaagtatcatctaaatggccgggactcgttggttaatccaggaccagctatggccagccacaaagacgatgaagaaaagtttttccccatgcatggaaccctgatatttggtaaacaaggaacaaatgctaacgacgcggatttggacaatgccatgattacagatgaagaagaaatccgcaccaccaatcccgtggctacggagcagtacgggactgtgtcaaataatttgcaaaactcaaatactggtccaactactggaactgtcaatcaccaaggagcgttacctggtatggtgtggcaggatcgagacgtgtacctgcagggacccatttgggccaagattcctcacaccgatggacactttcatccttctccactgatgggaggttttggactcaaacacccgcctcctcagatcatgatcaaaaacactcccgttccagccaatcctcctacaaacttcagttctgccaagtttgcttccttcatcacacagtattccacaggacaagtcagcgtggagattgagtgggagctgcagaaggagaacagcaaacgctggaaccccgagatccagtacacttccaactacaacaaatctgttaatgtggactttactgtggacactaatggcgtgtattcagagcctcgccccattggcaccagatacctgactcgtaatctgtaa

SEQ ID NO: 12995 - DNA, 2208 bp, Artificial Sequence
  source: /note="Description of Artificial Sequence: Synthetic polynucleotide"
atggctgccgatggttatcttccagattggctcgaggacactctctctgaaggaataagacagtggtggaagctcaaacctggcccaccaccgccaaagcccgcagagcggcacaaggacgacagtaggggtcttgtgcttcctgggtacaagtacctcggacccttcaacggactcgacaaaggagagccggtcaacgaggcagacgccgcggccctcgagcacgacaaggcctacgaccggcagctcgacagcggagacaacccgtacctcaagtacaaccacgccgacgcggagtttcaggagcgtcttaaagaagatacgtcttttgggggcaacctcggacgagcagtattccaggcgaaaaagagggttcttgaacctctgggcctggttgaggagcctgttaagacggctccgggaaaaaagaggccggtagagcactctcctgtggagccagactcctcctcgggaaccggaaaagcgggccagcagcctgcaagaaaaagattgaattttggtcagactggagacgcagactccgtacctgacccccagcctctcggacagccaccagcagcccccacaagtttgggatctactacaatggctacaggcagtggcgcaccaatggcaggcaataacgagggtgccgatggagtgggtaattcctcaggaaattggcattgcgattcccaatggctgggcgacagagtcatcaccaccagcacccgaacctgggccctgcccacctacaacaaccacctctacaagcaaatctccagccaatcaggagcatcgaacgacaaccactactttggctacagcaccccttgggggtattttgacttcaacagattccactgtcacttctccccacgtgactggcaaagactcatcaacaacaactggggattccgacccaagagactcaacttcaagctctttaacattcaagtcaaagaggtcacgcagaatgacggtacgacgacgattgccaataaccttaccagcacggttcaggtgtttactgactcggagtaccagctcccgtacgtcctcggctcggcgcatcaaggatgcctcccgccgttcccagcagacgtcttcatggtcccacagtatggatacctcaccctgaacaacgggagtcaggcggtaggacgctcttccttttactgcctggagtactttccttctcagatgcttcgtaccggaaacaactttaccttcagctacacctttgaagacgtgcctttccacagtagctacgctcacagccagagtctggatcggctgatgaatcctcttatcgaccagtacctgtattatctaaacaaaacacaatcaaatagtggaactcttcagcagtctcggctactgtttagtcaagctggacccaccagcatgtctcttcaagctaaaaactggctgcctggaccttgctacagacaacagcgtctgtcaaagcaggcaaacgacaacaacaacagcaactttccctggactgcggctacaaagtatcatctaaatggccgggactcgttggttaatccaggaccagctatggccagccacaaagacgatgaagaaaagtttttccccatgcatggaaccctgatatttggtaaacaaggaacaaatgctaacgacgcggatttggacaatgtcatgattacagatgaagaagaaatccgcaccaccaatcccgtggctacggagcagtacgggactgtgtcaaataatttgcaaaactcaaatactggtccaactactggaactgtcaatcaccaaggagcgttacctggtatggtgtggcaggatcgagacgtgtacctgcagggacccatttgggccaagattcctcacaccgatggacactttcatccttctccactgatgggaggttttggactcaaacacccgcctcctcagatcatgatcaaaaacactcccgttccagccaatcctcctacaaacttcagttctgccaagtttgcttccttcatcacacagtattccacaggacaagtcagcgtggagattgagtgggagctgcagaaggagaacagcaaacgctggaaccccgagatccagtacacttccaactacaacaaatctgttaatgtggactttactgtggacactaatggcgtgtattcagagcctcgccccattggcaccagatacctgactcgtaatctgtaa

SEQ ID NO: 12996 - DNA, 2208 bp, Artificial Sequence
  source: /note="Description of Artificial Sequence: Synthetic polynucleotide"
atggctgccgatggttatcttccagattggctcgaggacactctctctgaaggaataagacagtggtggaagctcaaacctggcccaccaccgccaaagcccgcagagcggcacaaggacgacagtaggggtcttgtgcttcctgggtacaagtacctcggacccttcaacggactcgacaaaggagagccggtcaacgaggcagacgccgcggccctcgagcacgacaaggcctacgaccggcagctcgacagcggagacaacccgtacctcaagtacaaccacgccgacgcggagtttcaggagcgtcttaaagaagatacgtcttttgggggcaacctcggacgagcagtattccaggcgaaaaagagggttcttgaacctctgggcctggttgaggagcctgttaagacggctccgggaaaaaagaggccggtagagcactctcctgtggagccagactcctcctcgggaaccggaaaagcgggccagcagcctgcaagaaaaagattgaattttggtcagactggagacgcagactccgtacctgacccccagcctctcggacagccaccagcagcccccacaagtttgggatctactacaatggctacaggcagtggcgcaccaatggcagacaataacgagggtgccgatggagtgggtaattcctcaggaaattggcattgcgattcccaatggctgggcgacagagtcatcaccaccagcacccgaacctgggccctgcccacctacaacaaccacctctacaagcaaatctccagccaatcaggagcatcgaacgacaaccactactttggctacagcaccccttgggggtattttgacttcaacagattccactgtcacttctccccacgtgactggcaaagactcatcaacaacaactggggattccgacccaagagactcaacttcaagctctttaacattcaagtcaaagaggtcgcgcagaatgacggtacgacgacgattgccaataaccttaccagcacggttcaggtgtttactgactcggagtaccagctcccgtacgtcctcggctcggcgcatcaaggatgcctcccgccgttcccagcagacgtcttcatggtcccacagtatggatacctcaccctgaacaacgggagtcaggcggtaggacgctcttccttttactgcctggagtactttccttctcagatgcttcgtaccggaaacaactttaccttcagctacacctttgaagacgtgcctttccacagtagctacgctcacagccagagtctggatcggctgatgaatcctcttatcgaccagtacctgtattatctaaacaaaacacaatcaaatagtggaactcttcagcagtctcggctactgtttagtcaagctggacccaccagcatgtctcttcaagctaaaaactggctgcctggaccttgctacagacaacagcgtctgtcaaagcaggcaaacgacaacaacaacagcaactttccctggactgcggctacaaagtatcatctaaatggccgggactcgttggttaatccaggaccagctatggccagccacaaagacgatgaagaaaagtttttccccatgcatggaaccctgatatttggtaaacaaggaacaaatgctaacgacgcggatttggacaatgtcatgattacagatgaagaagaaatccgcaccaccaatcccgtggctacggagcagtacgggactgtgtcaaataatttgcaaaactcaaatactggtccaactactggaactgtcaatcaccaaggagcgttacctggtatggtgtggcaggatcgagacgtgtacctgcagggacccatttgggccaagattcctcacaccgatggacactttcatccttctccactgatgggaggttttggactcaaacacccgcctcctcagatcatgatcaaaaacactcccgttccagccaatcctcctacaaacttcagttctgccaagtttgcttccttcatcacacagtattccacaggacaagtcagcgtggagattgagtgggagctgcagaaggagaacagcaaacgctggaaccccgagatccagtacacttccaactacaacaaatctgttaatgtggactttactgtggacactaatggcgtgtattcagagcctcgccccattggcaccagatacctgactcgtaatctgtaa

SEQ ID NO: 12997 - DNA, 2208 bp, Artificial Sequence
  source: /note="Description of Artificial Sequence: Synthetic polynucleotide"
atggctgccgatggttatcttccagattggctcgaggacactctctctgaaggaataagacagtggtggaagctcaaacctggcccaccaccgccaaagcccgcagagcggcacaaggacgacagtaggggtcttgtgcttcctgggtacaagcacctcggacccttcaacggactcgacaaaggagagccggtcaacgaggcagacgccgcggccctcgagcacgacaaggcctacgaccggcagctcgacagcggagacaacccgtacctcaagtacaaccacgccgacgcggagtttcaggagcgtcttaaagaagatacgtcttttgggggcaacctcggacgagcagtattccaggcgaaaaagagggttcttgaacctctgggcctggttgaggagcctgttaagacggctccgggaaaaaagaggccggtagagcactctcctgtggagccagactcctcctcgggaaccggaaaagcgggccagcagcctgcaagaaaaagattgaattttggtcagactggagacgcagactccgtacctgacccccagcctctcggacagccaccagcagcccccacaagtttgggatctactacaatggctacaggcagtggcgcaccaatggcagacaataacgagggtgccgatggagtgggtaattcctcaggaaattggcattgcgattcccaatggctgggcgacagagtcatcaccaccagcacccgaacctgggccctgcccacctacaacaaccacctctacaagcaaatctccagccaatcaggagcatcgaacgacaaccactactttggctacagcaccccttgggggtattttgacttcaacagattccactgtcacttctccccacgtgactggcaaagactcatcaacaacaactggggattccgacccaagagactcaacttcaagctctttaacattcaagtcaaagaggtcacgcagaatgacggtacgacgacgattgccaataaccttaccagcacggttcaggtgtttactgactcggagtaccagctcccgtacgtcctcggctcggcgcatcaaggatgcctcccgccgttcccagcagacgtcttcatggtcccacagtatggatacctcaccctgaacaacgggagtcaggcggtaggacgctcttccttttactgcctggagtactttccttctcagatgcttcgtaccggaaacaactttaccttcagctacacctttgaagacgtgcctttccacagtagctacgctcacagccagagtctggatcggctgatgaatcctcttatcgaccagtacctgtattatctaaacaaaacacaatcaaatagtggaactcttcagcagtctcggctactgtttagtcaagctggacccaccagcatgtctcttcaagctaaaaactggctgcctggaccttgctacagacaacagcgtctgtcaaagcaggcaaacgacaacaacaacagcaactttccctggactgcggctacaaagtatcatctaaatggccgggactcgttggttaatccaggaccagctatggccagccacaaagacgatgaagaaaagtttttccccatgcatggaaccctgatatttggtaaacaaggaacaaatgctaacgacgcggatttggacaatgtcatgattacagatgaagaagaaatccgcaccaccaatcccgtggctacggagcagtacgggactgtgtcaaataatttgcaaaactcaaatactggtccaactactggaactgtcaatcaccaaggagcgttacctggtatggtgtggcaggatcgagacgtgtacctgcagggacccatttgggccaagattcctcacaccgatggacactttcatccttctccactgatgggaggttttggactcaaacacccgcctcctcagatcatgatcaaaaacactcccgttccagccaatcctcctacaaacttcagttctgccaagtttgcttccttcatcacacagtattccacaggacaagtcagcgtggagattgagtgggagctgcagaaggagaacagcaaacgctggaaccccgagatccagtacacttccaactacaacaaatctgttaatgtggactttactgtggacactaatggcgtgtattcagagcctcgccccattggcaccagatacctgactcgtaatctgtaa

SEQ ID NO: 12998 - DNA, 2208 bp, Artificial Sequence
  source: /note="Description of Artificial Sequence: Synthetic polynucleotide"
atggctgccgatggttatcttccagattggcccgaggacactctctctgaaggaataagacagtggtggaagctcaaacctggcccaccaccgccaaagcccgcagagcggcacaaggacgacagtaggggtcttgtgcttcctgggtacaagtacctcggacccttcaacggactcgacaaaggagagccggtcaacgaggcagacgccgcggccctcgagcacgacaaggcctacgaccggcagctcgacagcggagacaacccgtacctcaagtacaaccacgccgacgcggagtttcaggagcgtcttaaagaagatacgtcttttgggggcaacctcggacgagcagtattccaggcgaaaaagagggttcttgaacctctgggcctggttgaggagcctgttaagacggctccgggaaaaaagaggccggtagagcactctcctgtggagccagactcctcctcgggaaccggaaaagcgggccagcagcctgcaagaaaaagattgaattttggtcagactggagacgcagactccgtacctgacccccagcctctcggacagccaccagcagcccccacaagtttgggatctactacaatggctacaggcagtggcgcaccaatggcagacaataacgagggtgccgatggagtgggtaattcctcaggaaattggcattgcgattcccaatggctgggcgacagagtcatcaccaccagcacccgaacctgggccctgcccacctacaacaaccacctctacaagcaaatctccagccaatcaggagcatcgaacgacaaccactactttggctacagcaccccttgggggtattttgacttcaacagattccactgtcacttctccccacgtgactggcaaagactcatcaacaacaactggggattccgacccaagagactcaacttcaagctctttaacattcaagtcaaagaggtcacgcagaatgacggtacgacgacgattgccaataaccttaccagcacggttcaggtgtttactgactcggagtaccagctcccgtacgtcctcggctcggcgcatcaaggatgcctcccgccgttcccagcagacgtcttcatggtcccacagtatggatacctcaccctgaacaacgggagtcaggcggtaggacgctcttccttttactgcctggagtactttccttctcagatgcttcgtaccggaaacaactttaccttcagctacacctttgaagacgtgcctttccacagtagctacgctcacagccagagtctggatcggctgatgaatcctcttatcgaccagtacctgtattatctaaacaaaacacaatcaaatagtggaactcttcagcagtctcggctactgtttagtcaagctggacccaccagcatgtctcttcaagctaaaaactggctgcctggaccttgctacagacaacagcgtctgtcaaagcaggcaaacgacaacaacaacagcaactttccctggactgcggctacaaagtatcatctaaatggccgggactcgttggttaatccaggaccagctatggccagccacaaagacgatgaagaaaagtttttccccatgcatggaaccctgatatttggtaaacaaggaacaaatgctaacgacgcggatttggacaatgtcatgattacagatgaagaagaaatccgcaccaccaatcccgtggctacggagcagtacgggactgtgtcaaataatttgcaaaactcaaatactggtccaactactggaactgtcaatcaccaaggagcgttacctggtatggtgtggcaggatcgagacgtgtacctgcagggacccatttgggccaagattcctcacaccgatggacactttcatccttctccactgatgggaggttttggactcaaacacccgcctcctcagatcatgatcaaaaacactcccgttccagccaatcctcctacaaacttcagttctgccaagtttgcttccttcatcacacagtattccacaggacaagtcagcgtggagattgagtgggagctgcagaaggagaacagcaaacgctggaaccccgagatccagtacacttccaactacaacaaatctgttaatgtggactttactgtggacactaatggcgtgtattcagagcctcgccccattggcaccagatacctgactcgtaatctgtaa

SEQ ID NO: 12999 - DNA, 2208 bp, Artificial Sequence
  source: /note="Description of Artificial Sequence: Synthetic polynucleotide"
atggctgccgatggttatcttccagattggctcgaggacactctctctgaaggaataagacagtggtggaagctcaaacctggcccaccaccgccaaagcccgcagagcggcacaaggacgacagtaggggtcttgtgcttcctgggtacaagtacctcggacccttcaacggactcgacaaaggagagccggtcaacgaggcagacgccgcggccctcgagcacgacaaggcctacgaccggcagctcgacagcggagacaacccgtacctcaagtacaaccacgccgacgcggagtttcaggagcgtcttaaagaagatacgtcttttgggggcaacctcggacgagcagtattccaggcgaaaaagagggttcttgaacctctgggcctggttgaggagcctgttaagacggctccgggaaaaaagaggccggtagagcactctcctgtggagccagactcctcctcgggaaccggaaaagcgggccagcagcctgcaagaaaaagattgaattttggtcagactggagacgcagactccgtacctgacccccagcctctcggacagccaccagcagcccccacaagtttgggatctactacaatggctacaggcagtggcgcaccaatggcagacaataacgagggtgccgatggagtgggtaattcctcaggaaattggcattgcgattcccaatggctgggcgacagagtcatcaccaccagcacccgaacctgggccctgcccacctacaacaaccacctctacaagcaaatctccagccaatcaggagcatcgaacgacaaccactactttggctacagcaccccttgggggtattttgacttcaacagattccactgtcacttctccccacgtgactggcaaagactcatcaacaacaactggggattccgacccaagagactcaacttcaagctctttaacattcaagtcaaagaggtcacgcagaatgacggtacgacgacgattgccaataaccttaccagcacggttcaggtgtttactgactcggagtaccagctcccgtacgtcctcggctcggcgcatcaaggatgcctcccgccgttcccagcagacgtcttcatggtcccacagtatggatacctcaccctgaacaacgggagtcaggcggtaggacgctcttccttttactgcctggagtactttccttctcagatgcttcgtaccggaaacaactttaccttcagctacacctttgaagacgtgcctttccacagtagctacgctcacagccagagtctggatcggctgatgaatcctcttatcgaccagtacctgtattatctaaacaaaacacaatcaaatagtggaactcttcagcagtctcggctactgtttagtcaagctggacccaccagcatgtctcttcaagctaaaaactggctgcctggaccttgctacagacaacagcgtctgtcaaagcaggcaaacgacaacaacaacagcaactttccctggactgcggctacaaagtatcatctaaatggccgggactcgttggttaatccaggaccagctatggccagccacaaagacgatgaagaaaagtttttccccatgcatggaaccctgatatttggtaaacaaggaacaaatgctaacgacgcggatttggacaatgtcatgattacagatgaagaagaaatccgcaccaccaatcccgtggctacggagcagtacgggactgtgtcaaataatttgcaaaactcaaatactggtccaactactggaactgtcaatcaccaaggagcgttacctggtatggtgtggcaggatcgaggcgtgtacctgcagggacccatttgggccaagattcctcacaccgatggacactttcatccttctccactgatgggaggttttggactcaaacacccgcctcctcagatcatgatcaaaaacactcccgttccagccaatcctcctacaaacttcagttctgccaagtttgcttccttcatcacacagtattccacgggacaagtcagcgtggagattgagtgggagctgcagaaggagaacagcaaacgctggaaccccgagatccagtacacttccaactacaacaaatctgttaatgtggactttactgtggacactaatggcgtgtattcagagcctcgccccattggcaccagatacctgactcgtaatctgtaa

SEQ ID NO: 13000 - DNA, 2208 bp, Artificial Sequence
  source: /note="Description of Artificial Sequence: Synthetic polynucleotide"
atggctgccgatggttatcttccagattggctcgaggacactctctctgaaggaataagacagtggtggaagctcaaacctggcccaccaccgccaaagcccgcagagcggcacaaggacgacagtaggggtcttgtgcttcctgggtacaagtacctcggacccttcaacggactcgacaaaggagagccggtcaacgaggcagacgccgcggccctcgagcacgacaaggcctacgaccggcagctcgacagcggagacaacccgtacctcaagtacaaccacgccgacgcggagtttcaggagcgtcttaaagaagatacgtcttttgggggcaacctcggacgagcagtattccaggcgaaaaagagggttcttgaacctctgggcctggttgaggagcctgttaagacggctccgggaaaaaagaggccggtagagcactctcctgtggagccagactcctcctcgggaaccggaaaagcgggccagcagcctgcaagaaaaagattgaattttggtcagactggagacgcagactccgtacctgacccccagcctctcggacagccaccagcagcccccacaagtttgggatctactacaatggctacaggcagtggcgcaccaatggcagacaataacgagggtgccgatggagtgggtaattcctcaggaaattggcattgcgattcccaatggctgggcgacagagtcatcaccaccagcacccgaacctgggccctgcccacctacaacaaccacctctacaagcaaatctccagccaatcaggagcatcgaacgacaaccactactttggctacagcaccccttgggggtattttgacttcaacagattccactgtcacttctccccacgtgactggcaaagactcatcaacaacaactggggattccgacccaagagactcaacttcaagctctttaacattcaagtcaaagaggtcacgcagaatgacggtacgacgacgattgccaataaccttaccagcacggttcaggtgtttactgactcggagtaccagctcccgtacgtcctcggctcggcgcatcaaggatgcctcccgccgttcccagcagacgtcttcatggtcccacagtatggatacctcaccctgaacaacgggagtcaggcggtaggacgctcttccttttactgcctggagtactttccttctcagatgcttcgtaccggaaacaactttaccttcagctacacctttgaagacgtgcctttccacagtagctacgctcacagccagagtctggatcggctgatgaatcctcttatcgaccagtacctgtattatctaaacaaaacacaatcaaatagtggaactcttcagcagtctcggctactgtttagtcaagctggacccaccagcatgtctcttcaagctaaaaactggctgcctggaccttgctacagacaacagcgtctgtcaaagcaggcaaacgacaacaacaacagcaactttccctggactgcggctacaaagtatcatctaaatggccgggactcgttggttaatccaggaccagctatggccagccacaaagacgatgaagaaaagtttttccccatgcatggaaccctgatatttggtaaacaaggaacaaatgctaacgacgcggatttggacaatgtcatgattacagatgaagaagaaatccgcaccaccaatcccgtggctacggagcagtacgggactgtgtcaaataatttgcaaaactcaaatactggtccaactactggaactgtcaatcaccaaggagcgttacctggtatggtgtggcaggatcgagacgtgtacctgcagggacccatttgggccaagattcctcacaccgatggacactttcatccttctccactgatgggaggttttggactcaaacacccgcctcctcagatcatgatcaaaaacactcccgttccagccaatcctcctacaaacttcagttctgccaagtttgcttccttcatcacacagtattccacgggacaagtcagcgtggagattgagtgggagctgcagaaggagaacagcaaacgctggaaccccgagatccagtacacttccaactacaacaaatctgttaatgtggactttactgtgggcactaatggcgtgtattcagagcctcgccccattggcaccagatacctgactcgtaatctgtaa

SEQ ID NO: 13001 - DNA, 2208 bp, Artificial Sequence
  source: /note="Description of Artificial Sequence: Synthetic polynucleotide"
atggctgccgatggttatcttccagattggctcgaggacactctctctgaaggaataagacagtggtggaagctcaaacctggcccaccaccaccaaagcccgcagagcggcatcaggacgacagcaggggtcttgtgcttcctgggtacaagtacctcggacccctcaacggactcgacaaaggagagccggtcaacgaggcagacgctgcggccctcgagcacgacaaggcctacgaccggcagctcgacagcggagacaacccgtacctcaagtacaaccacgccgacgcggagtttcaggagcgtcttaaagaagatacgtcttttgggggcaacctcggacgagcagtcttccaggcgaaaaagagggttcttgaacctctgggcctggttgaggaacctgttaagacggctccgggaaaaaagaggccggtagagcactctcctgcggagccagactcctcctcgggaaccggaaaagcgggccagcagcctgcaagaaagagattgaatttcggtcagactggagacgcagactccgtacctgacccccagcctctcggacagccaccagcagcccccacaagtttgggatctactacaatggctacaggcagtggcgcaccaatggcagacaataacgagggtgccgatggagtgggtaattcctcaggaaattggcattgcgattcccaatggctgggcgacagagtcatcaccaccagcacccgaacctgggccctgcccacctacaacaaccacctctacaagcaaatctccagccaatcaggagcatcgaacgacaaccactactttggctacagcaccccttgggggtattttgacttcaacagattccactgtcacttctccccacgtgactggcaaagactcatcaacaacaactggggattccgacccaagagactcaacttcaagctctttaacattcaagtcaaagaggtcacgcagaatgacggtacgacgacgattgccaataaccttaccagcacggttcaggtgtttactgactcggagtaccagctcccgtacgtcctcggctcggcgcatcaaggatgcctcccgccgtttccagcggacgtcttcatggtcccacagtatggatacctcaccctgaacaacgggagtcaggcggtaggacgctcttccttttactgcctggagtactttccttctcagatgctgcgtaccggaaacaactttaccttcagctacacctttgaggacgtgcctttccacagcagctacgctcacagccagagtttggaccggctgatgaatcctctgatcgaccagtatctgtattatctgaacaggacacaatcaaatagtggaactcttcagcagtctaggctactgtttagccaagctggacccaccagcatgtctcttcaagctaaaaactggctgcctggaccttgctacagacagcagcgtctgtcaaagcaggcaaacgacaacaacaacagcaactttccctggactgcggctacaaagtatcatctaaatggtcgggactcgttggttaatccaggaccagctatggccagccacaaagacgatgaagaaaagtttttccccatgcatggaaccctgatatttggtaaacaaggaacaaatgctaacgacgcggatttggaacatgtcatgattacagatgaagaagaaatcaggaccaccaatcccgtggctacagagcagtacggaaacgtgtcaaataatttgcaaaactcaaatactggtccaactacagaaaatgtcaatcaccagggagcgttacctggtatggtgtggcaggatcgagacgtgtacctgcagggacccatttgggccaagattcctcacaccgacggacactttcacccttctccactgatgggaggttttggactcaaacacccgcctcctcaaatcatgatcaaaaacactcctgttccagccaatcctcctacaaacttcagcgcggcaaagtttgcttccttcatcacacagtattccacgggacaggtcagcgtggagatcgagtgggagctgcagaaggagaacagcaaacgctggaaccccgagatccagtacacttccaactacaacaaatctgttaatgtggactttactgtggacactaatggtgtgtattcagagcctcgccccattggcaccagatacctgactcgtaatctgtaa

SEQ ID NO: 13002 - DNA, 2208 bp, Artificial Sequence
  source: /note="Description of Artificial Sequence: Synthetic polynucleotide"
atggctgccgatggttatcttccagattggctcgaggacactctctctgaaggaataagacagtggtggaagctcaaacctggcccaccaccaccaaagcccgcagagcggcatcaggacgacagcaggggtcttgtgcttcctgggtacaagtacctcggacccttcaacggactcgacaaaggagagccggtcaacgaggcagacgctgcggccctcgagcacgacaaggcctacgaccggcagctcgacagcggagacaacccgtacctcaagtacaaccacgccgacgcggagtttcaggagcgtcttaaagaagatacgtcttttgggggcaacctcggacgagcagtcttccaggcgaaaaagagggttcttgaacctctgggcctggttgaggaacctgttaagacggctccgggaaaaaagaggccggtagagcactctcctgcggagccagactcctcctcgggaaccggaaaagcgggccagcagcctgcaagaaagagattgaatttcggtcagactggagacgcagactccgtacctgacccccagcctctcggacagccaccagcagcccccacaagtttgggatctactacaatggctacaggcagtggcgcaccaatggcagacaataacgagggtgccgatggagtgggtaattcctcaggaaattggcattgcgattcccaatggctgggcgacagagtcatcaccaccagcacccgaacctgggccctgcccacctacaacaaccacctctacaagcaaatctccagccaatcaggagcatcgaacgacaaccactactttggctacagcaccccttgggggtattttgacttcaacagattccactgtcacttctccccacgtgactggcaaagactcatcaacaacaactggggattccgacccaagagactcaacttcaagctctttaacattcaagtcaaagaggtcacgcagaatgacggtacgacgacgattgccaataaccttaccagcacgattcaggtgtttactgactcggagtaccagctcccgtacgtcctcggctcggcgcatcaaggatgcctcccgccgtttccagcggacgtcttcatggtcccacagtatggatacctcaccctgaacaacgggagtcaggcggtaggacgctcttccttttactgcctggagtactttccttctcagatgctgcgtaccggaaacaactttaccttcagctacacctttgaggacgtgcctttccacagcagctacgctcacagccagagtttggaccggctgatgaatcctctgatcgaccagtatctgtattatctgaacaggacacaatcaaatagtggaactcttcagcagtctaggctactgtttagccaagctggacccaccagcatgtctcttcaagctaaaaactggctgcctggaccttgctacagacagcagcgtctgtcaaagcaggcaaacgacaacaacaacagcaactttccctggactgcggctacaaagtatcatctaaatggtcgggactcgttggttaatccaggaccagctatggccagccacaaagacgatgaagaaaagtttttccccatgcatggaaccctgatatttggtaaacaaggaacaaatgctaacgacgcggatttggaacatgtcatgattacagatgaagaagaaatcaggaccaccaatcccgtggctacagagcagtacggaaacgtgtcaaataatttgcaaaactcaaatactggtccaactacagaaaatgtcaatcaccagggagcgttacctggtatggtgtggcaggatcgagacgtgtacctgcagggacccatttgggccaagattcctcacaccgacggacactttcacccttctccactgatgggaggttttggactcaaacacccgcctcctcaaatcatgatcaaaaacactcctgttccagccaatcctcctacaaacttcagcgcggcaaagtttgcttccttcatcacacagtattccacgggacaggtcagcgtggagatcgagtgggagctgcagaaggagaacagcaaacgctggaaccccgagatccagtacacttccaactacaacaaatctgttaatgtggactttactgtggacactaatggtgtgtattcagagcctcgccccattggcaccagatacctgactcgtaatctgtaa

SEQ ID NO: 13003 - DNA, 2208 bp, Artificial Sequence
  source: /note="Description of Artificial Sequence: Synthetic polynucleotide"
atggctgccgatggttatcttccagattggctcgaggacactctctctgaaggaataagacagtggtggaagctcaaacctggcccaccaccaccaaagcccgcagagcggcatcaggacgacagcaggggtcttgtgcttcctgggtacaagtacctcggacccttcaacggactcgacaaaggagagccggtcaacgaggcagacgctgcggccctcgagcacgacaaggcctacgaccggcagctcgacagcggagacaacccgtacctcaagtacaaccacgccgacgcggagtttcaggagcgtcttaaagaagatacgtcttttgggggcaacctcggacgagcagtcttccaggcgaaaaagagggttcttgaacctctgggcctggttgaggaacctgttaagacggctccgggaaaaaagaggccggtagggcactctcctgcggagccagactcctcctcgggaaccggaaaagcgggccagcagcctgcaagaaagagattgaatttcggtcagactggagacgcagactccgtacctgacccccagcctctcggacagccaccagcagcccccacaagtttgggatctactacaatggctacaggcagtggcgcaccaatggcagacaataacgagggtgccgatggagtgggtaattcctcaggaaattggcattgcgattcccaatggctgggcgacagagtcatcaccaccagcacccgaacctgggccctgcccacctacaacaaccacctctacaagcaaatctccagccaatcaggagcatcgaacgacaaccactactttggctacagcaccccttgggggtattttgacttcaacagattccactgtcacttctccccacgtgactggcaaagactcatcaacaacaactggggattccgacccaagagactcaacttcaagctctttaacattcaagtcaaagaggtcacgcagaatgacggtacgacgacgattgccaataaccttaccagcacggttcaggtgtttactgactcggagtaccagctcccgtacgtcctcggctcggcgcatcaaggatgcctcccgccgtttccagcggacgtcttcatggtcccacagtatggatacctcaccctgaacaacgggagtcaggcggtaggacgctcttccttttactgcctggagtactttccttctcagatgctgcgtaccggaaacaactttaccttcagctacacctttgaggacgtgcctttccacagcagctacgctcacagccagagtttggaccggctgatgaatcctctgatcgaccagtatctgtattatctgaacaggacacaatcaaatagtggaactcttcagcagtctaggctactgtttagccaagctggacccaccagcatgtctcttcaagctaaaaactggctgcctggaccttgctacagacagcagcgtctgtcaaagcaggcaaacgacaacaacaacagcaactttccctggactgcggctacaaagtatcatctaaatggtcgggactcgttggttaatccaggaccagctatggccagccacaaagacgatgaagaaaagtttttccccatgcatggaaccctgatatttggtaaacaaggaacaaatgctaacgacgcggatttggaacatgtcatgattacagatgaagaagaaatcaggaccaccaatcccgtggctacagagcagtacggaaacgtgtcaaataatttgcaaaactcaaatactggtccaactacagaaaatgtcaatcaccagggagcgttacctggtatggtgtggcaggatcgagacgtgtacctgcagggacccatttgggccaagattcctcacaccgacggacactttcacccttctccactgatgggaggttttggactcaaacacccgcctcctcaaatcatgatcaaaaacactcctgttccagccaatcctcctacaaacttcagcgcggcaaagtttgcttccttcatcacacagtattccacgggacaggtcagcgtggagatcgagtgggagctgcagaaggagaacagcaaacgctggaaccccgagatccagtacacttccaactacaacaaatctgttaatgtggactttactgtggacactaatggtgtgtattcagagcctcgccccattggcaccagatacctgactcgtaatctgtaa

SEQ ID NO: 13004 - DNA, 2208 bp, Artificial Sequence
  source: /note="Description of Artificial Sequence: Synthetic polynucleotide"
atggctgccgatggttatcttccagattggctcgaggacactctctctgaaggaataagacagtggtggaagctcaaacctggcccaccaccaccaaagcccgcagagcggcatcaggacgacagcaggggtcttgtgcttcctgggtacaagtacctcggacccttcaacggactcgacaaaggagagccggtcaacgaggcagacgctgcggccctcgagcacgacaaggcctacgaccggcagctcgacagcggagacaacccgtacctcaagtacaaccacgccgacgcggagtttcaggagcgtcttaaagaagatacgtcttttgggggcaacctcggacgagcagtcttccaggcgaaaaagagggttcttgaacctctgggcctggttgaggaacctgttaagacggctccgggaaaaaagaggccggtagagcactctcctgcggagccagactcctcctcgggaaccggaaaagcgggccagcagcctgcaagaaagagattgaatttcggtcagactggagacgcagactccgtacctgacccccagcctctcggacagccaccagcagcccccacaagtttgggatctactacaatggctacaggcagtggcgcaccaatggcagacaataacgagggtgccgatggagtgggtaattcctcaggaaattggcattgcgattcccaatggctgggcgacagagtcatcaccaccagcacccgaacctgggccctgcccacctacaacaaccacctctacaagcaaatctccagccaatcaggagcatcgaacgacaaccactactttggctacagcaccccttgggggtattttgacttcaacagattccactgtcacttctccccacgtgactggcaaagactcatcaacaacaactggggattccgacccaagagactcaacttcaagctctttaacattcaagtcaaagaggtcacgcagaatgacggtacgacgacgattgccaataaccttaccagcacggttcaggtgtttactgactcggagtaccagctcccgtacgtcctcggctcggcgcatcaaggatgcctcccgccgtttccagcggacgtcttcatggtcccacagtatggatacctcaccctgaacaacgggagtcaggcggtaggacgctcttccttttactgcctggagtactttccttctcagatgctgcgtaccggaaacaactttaccttcagctacacctttgaggacgtgcctttccacagcagctacgctcacagccagagtttggaccggctgatgaatcctctgatcgaccagtatctgtattatctgaacaggacacaatcaaatagtggaactcttcagcagtctaggctactgtttagccaagctggacccaccagcatgtctcttcaagctaaaaactggctgcctggaccttgctacagacagcagcgtctgtcaaagcaggcaaacgacaacaacaacagcaactttccctggactgcggctacaaagtatcatctaaatggtcgggactcgttggttaatccaggaccagctatggccagccacaaagacgatgaagaaaagtttttccccatgcatggaaccctgatatttggtaaacaaggaacaaatgctaacgacgcggatttggaacatgtcatgattacagatgaagaagaaatcaggaccaccaatcccgtggctacagagcagtacggaaacgtgtcaaataatttgcaaaactcaaatactggtccaactacagaaaatgtcaatcaccagggagcgttacctggtatggtgtggcaggatcgagacgtgtacctgcagggacccatttgggccaagattcctcacaccgacggacactttcacccttctccactgatgggaggttttggactcaaacacccgcctcctcaaatcatgatcaaaaacactcctgttccagccaatcctcctacaaacttcagcgcggcaaagtttgcttccttcatcacacagtattccacgggacaggtcagcgtggagatcgagcgggagctgcagaaggagaacagcaaacgctggaaccccgagatccagtacacttccaactacaacaaatctgttaatgtggactttactgtggacactaatggtgtgtattcagagcctcgccccattggcaccagatacctgactcgtaatctgtaa

SEQ ID NO: 13005 - DNA, 2208 bp, Artificial Sequence
  source: /note="Description of Artificial Sequence: Synthetic polynucleotide"
atggctgccgatggttatcttccagattggctcgaggacactctctctgaaggaataagacagtggtggaagctcaaacctggcccaccaccaccaaagcccgcagagcggcatcaggacgacagcaggggtcttgtgcttcctgggtacaagtacctcggacccttcaacggactcgacaaaggagagccggtcaacgaggcagacgctgcggccctcgagcacgacaaggcctacgaccggcagctcgacagcggagacaacccgtacctcaagtacaaccacgccgacgcggagtttcaggagcgtcttaaagaagatacgtcttttgggggcaacctcggacgagcagtcttccaggcgaaaaagagggttcttgaacctctgggcctggttgaggaacctgttaagacggctccgggaaaaaagaggccggtagagcactctcctgcggagccagactcctcctcgggaaccggaaaagcgggccagcagcctgcaagaaagagattgaatttcggtcagactggagacgcagactccgtacctgacccccagcctctcggacagccaccagcagcccccacaagtttgggatctactacaatggctacaggcagtggcgcaccaatggcagacaataacgagggtgccgatggagtgggtaattcctcaggaaattggcattgcgattcccaatggctgggcgacagagtcatcaccaccagcacccgaacctgggccctgcccacctacaacaaccacctctacaagcaaatctccagccaatcaggagcatcgaacgacaaccactactttggctacagcaccccttgggggtattttgacttcaacagattccactgtcacttctccccacgtgactggcaaagactcatcaacaacaactggggattccgacccaagagactcaacttcaagctctttaacattcaagtcaaagaggtcacgcagaatgacggtacgacgacgattgccaataaccttaccagcacggttcaggtgtttactgactcggagtaccagctcccgtacgtcctcggctcggcgcatcaaggatgcctcccgccgtttccagcggacgtcttcatggtcccacagtatggatacctcaccctgaacaacgggagtcaggcggtaggacgctcttccttttactgcctggagtactttccttctcagatgctgcgtaccggaaacaactttaccttcagctacacctttgaggacgtgcctttccacagcagctacgctcacagccagagtttggaccggctgatgaatcctctgatcgaccagtatctgtattatctgaacaggacacaatcaaatagtggaactcttcagcagtctaggctactgtttagccaagctggacccaccagcatgtctcttcaagctaaaaactggctgcctggaccttgctacagacagcagcgtctgtcaaagcaggcaaacgacaacaacaacagcaactttccctggactgcggctacaaagtatcatctaaatggtcgggactcgttggttaatccaggaccagctatggccagccacaaagacgatgaagaaaagtttttccccatgcatggaaccctgatatttggtaaacaaggaacaaatgctaacgacgcggatttggaacatgtcatgattacagatgaagaagaaatcaggaccaccaatcccgtggctacagagcagtacggaaacgtgtcaaataatttgcaaaactcaaatactggtccaactacagaaaatgtcaatcaccagggagcgttacctggtatggtgtggcaggatcgagacgtgtacctgcagggacccatttgggccaagattcctcacaccgacggacactttcacccttctccactgatgggaggttttggactcaaacacccgcctcctcaaatcatgatcaaaaacactcctgttccagccaatcctcctacaaacttcagcgcggcaaagtttgcttccttcatcacacagtattccacgggacaggtcagcgtggagatcgagtgggagctgcagaaggagaacagcaaacgctggaaccccgagatccagtacacttccaactacaacaaatctgttaatgtggaccttactgtggacactaatggtgtgtattcagagcctcgccccattggcaccagatacctgactcgtaatctgtaa

SEQ ID NO: 13006 - DNA, 2208 bp, Artificial Sequence
  source: /note="Description of Artificial Sequence: Synthetic polynucleotide"
atggctgccgatggttatcttccagattggctcgaggacactctctctgaaggaataagacagtggtggaagctcaaacctggcccaccaccgccaaagcccgcagagcggcacaaggacgacagtaggggtcttgtgcttcctgggtacaagtacctcggacccttcaacggactcgacaaaggagagccggtcaacgaggcagacgccgcggccctcgagcacgacaaggcctacgaccggcagctcgacagcggagacaacccgtacctcaagtacaaccacgccgacgcggagtttcaggagcgtcttaaagaagatacgtcttttgggggcaacctcggacgagcagtattccaggcgaaaaagagggttcttgaacctctgggcctggttgaggagcctgttaagacggctccgggaaaaaagaggccggtagagcactctcctgtggagccagactcctcctcgggaaccggaaaagcgggccagcagcctgcaagaaaaagattgaattttggtcagactggagacgcagactccgtacctgacccccagcctctcggacagccaccagcagcccccacaagtttgggatctactacaatggctacaggcagtggcgcaccaatggcagacaataacgagggtgccgatggagtgggtaattcctcaggaaattggcattgcgattcccaatggctgggcgacagagtcatcaccaccagcacccgaacctgggccctgcccacctacaacaaccacctctacaagcaaatctccagccaatcaggagcatcgaacgacaaccactactttggccacagcaccccttgggggtattttgacttcaacagattccactgtcacttctccccacgtgactggcaaagactcatcaacaacaactggggattccgacccaagagactcaacttcaagctctttaacattcaagtcaaagaggtcacgcagaatgacggtacgacgacgattgccaataaccttaccagcacggttcaggtgtttactgactcggagtaccagctcccgtacgtcctcggctcggcgcatcaaggatgcctcccgccgttcccagcagacgtcttcatggtcccacagtatggatacctcaccctgaacaacgggagtcaggcggtaggacgctcttccttttactgcctggagtactttccttctcagatgcttcgtaccggaaacaactttaccttcagctacacctttgaagacgtgcctttccacagtagctacgctcacagccagagtctggatcggctgatgaatcctcttatcgaccagtacctgtattatctaaacaaaacacaatcaaatagtggaactcttcagcagtctcggctactgtttagtcaagctggacccaccagcatgtctcttcaagctaaaaactggctgcctggaccttgctacagacaacagcgtctgtcaaagcaggcaaacgacaacaacaacagcaactttccctggactgcggctacaaagtatcatctaaatggccgggactcgttggttaatccaggaccagctatggccagccacaaagacgatgaagaaaagtttttccccatgcatggaaccctgatatttggtaaacaaggaacaaatgctaacgacgcggatttggacaatgtcatgattacagatgaagaagaaatccgcaccaccaatcccgtggctacggagcagtacgggactgtgtcaaataatttgcaaaactcaaatactggtccaactactggaactgtcaatcaccaaggagcgttacctggtatggtgtggcaggatcgagacgtgtacctgcagggacccatttgggccaagattcctcacaccgatggacactttcatccttctccactgatgggaggttttggactcaaacacccgcctcctcagatcatgatcaaaaacactcccgttccagccaatcctcctacaaacttcagttctgccaagtttgcttccttcatcacacagtattccacgggacaagtcagcgtggagattgagtgggagctgcagaaggagaacagcaaacgctggaaccccgagatccagtacacttccaactacaacaaatctgttaatgtggactttactgtggacactaatggcgtgtattcagagcctcgccccattggcaccagatacctgactcgtaatctgtaa

SEQ ID NO: 13007 - DNA, 2208 bp, Artificial Sequence
  source: /note="Description of Artificial Sequence: Synthetic polynucleotide"
atggctgccgatggttatcttccagattggctcgaggacactctctctgaaggaataagacagtggtggaagctcaaacctggcccaccaccgccaaagcccgcagagcggcacaaggacgacagtaggggtcttgtgcttcctgggtacaagtacctcggacccttcaacggactcgacaaaggagagccggtcaacgaggcagacgccgcggccctcgagcacgacaaggcctacgaccggcagctcgacagcggagacaacccgtacctcaagtacaaccacgccgacgcggagtttcaggagcgtcttaaagaagatacgtcttttgggggcaacctcggacgagcagtattccaggcgaaaaagagggttcttgaacctctgggcctggttgaggagcctgttaagacggctccgggaaaaaagaggccggtagagcactctcctgtggagccagactcctcctcgggaaccggaaaagcgggccagcagcctgcaagaaaaagattgaattttggtcagactggagacgcagactccgtacctgacccccagcctctcggacagccaccagcagcccccacaagtttgggatctactacaatggctacaggcagtggcgcaccaatggcagacaataacgagggtgccgatggagtgggtaattcctcaggaaattggcattgcgattcccaatggctgggcgacagagtcatcaccaccagcacccgaacctgggccctgcccacctacaacaaccacctctacaagcaaatctccagccaatcaggagcaccgaacgacaaccactactttggccacagcaccccttgggggtattttgacttcaacagattccactgtcacttctccccacgtgactggcaaagactcatcaacaacaactggggattccgacccaagagactcaacttcaagctctttaacattcaagtcaaagaggtcacgcagaatgacggtacgacgacgattgccaataaccttaccagcacggttcaggtgtttactgactcggagtaccagctcccgtacgtcctcggctcggcgcatcaaggatgcctcccgccgttcccagcagacgtcttcatggtcccacagtatggatacctcaccctgaacaacgggagccaggcggtaggacgctcttccttttactgcctggagtactttccttctcagatgcttcgtaccggaaacaactttaccttcagctacacctttgaagacgtgcctttccacagtagctacgctcacagccagagtctggatcggctgatgaatcctcttatcgaccagtacctgtattatctaaacaaaacacaatcaaatagtggaactcttcagcagtctcggctactgtttagtcaagctggacccaccagcatgtctcttcaagctaaaaactggctgcctggaccttgctacagacaacagcgtctgtcaaagcaggcaaacgacaacaacaacagcaactttccctggactgcggctacaaagtatcatctaaatggccgggactcgttggttaatccaggaccagctatggccagccacaaagacgatgaagaaaagtttttccccatgcatggaaccctgatatttggtaaacaaggaacaaatgctaacgacgcggatttggacaatgtcatgattacagatgaagaagaaatccgcaccaccaatcccgtggctacggagcagtacgggactgtgtcaaataatttgcaaaactcaaatactggtccaactactggaactgtcaatcaccaaggagcgttacctggtatggtgtggcaggatcgagacgtgtacctgcagggacccatttgggccaagattcctcacaccgatggacactttcatccttctccactgatgggaggttttggactcaaacacccgcctcctcagatcatgatcaaaaacactcccgttccagccaatcctcctacaaacttcagttctgccaagtttgcttccttcatcacacagtattccacgggacaagtcagcgtggagattgagtgggagctgcagaaggagaacagcaaacgctggaaccccgagatccagtacacttccaactacaacaaatctgttaatgtggactttactgtggacactaatggcgtgtattcagagcctcgccccattggcaccagatacctgactcgtaatctgtaa

SEQ ID NO: 13008 - DNA, 2208 bp, Artificial Sequence
  source: /note="Description of Artificial Sequence: Synthetic polynucleotide"
atggctgccgatggttatcttccagattggctcgaggacactctctctgaaggaataagacagtggtggaagctcaaacctggcccaccaccgccaaagcccgcagagcggcacaaggacgacagtaggggtcttgtgcttcctgggtacaagtacctcggacccttcaacggactcgacaaaggagagccggtcaacgaggcagacgccgcggccctcgagcacgacaaggcctacgaccggcagctcgacagcggagacaacccgtacctcaagtacaaccacgccgacgcggagtttcaggagcgtcttaaagaagatacgtcttttgggggcaacctcggacgagcagtattccaggcgaaaaagagggttcttgaacctctgggcctggttgaggagcctgttaagacggctccgggaaaaaagaggccggtagagcactctcctgtggagccagactcctcctcgggaaccggaaaagcgggccagcagcctgcaagaaaaagattgaattttggtcagactggagacgcagactccgtacctgacccccagcctctcggacagccaccagcagcccccacaagtttgggatctactacaatggctacaggcagtggcgcaccaatggcagacaataacgagggtgccgatggagtgggtaattcctcaggaaattggcattgcgattcccaatggctgggcgacagagtcatcaccaccagcacccgaacctgggccctgcccacctacaacaaccacctctacaagcaaatctccagccaatcaggagcatcgaacgacaaccactactttggccacagcaccccttgggggtattttgacttcaacagattccactgtcacttctccccacgtgactggcaaagactcatcaacaacaactggggattccgacccaagagactcaacttcaagctctttaacattcaagtcaaagaggtcacgcagaatgacggtacgacgacgattgccaataaccttaccagcacggttcaggtgtttactgactcggagtaccagctcccgtacgtcctcggctcggcgcatcaaggatgcctcccgccgttcccagcagacgtcttcatggtcccacagtatggatacctcaccctgaacaacgggagtcaggcggtaggacgctcttccttttactgcctggagtactttccttctcagatgcttcgtaccggaaacaactttaccttcagctacacctttgaagacgtgcctttccacagtagctacgctcacagccagagtctggatcggctgatgaatcctcttatcgaccagtacctgtattatctaaacaaaacacaatcaaatagtggaactcttcagcagtctcggctactgtttagtcaagctggacccaccagcatgtctcttcaagctaaaaactggctgcctggaccttgctacagacaacagcgtctgtcaaagcaggcaaacgacaacaacaacagcaactttccctggactgcggctacaaagtatcatctaaatggccgggactcgttggttaatccaggaccagctatggccagccacaaagacgatgaagaaaagtttttccccatgcatggaaccctgatatttggtaaacaaggaacaaatgctaacgacgcggatttggacaatgtcatgattacagatgaagaagaaatccgcaccaccaatcccgtggctacggagcagtacgggactgtgtcaaataatttgcaaaactcaaatactggtccaactactggaactgtcaatcaccaaggagcgttacctggtatggtgtggcaggatcgagacgtgtacctgcagggacccatttgggccaagattcctcacaccgatggacactttcatccttctccactgatgggaggttttggactcaaacacccgcctcctcagatcatgatcaaaaacactcccgttccagccaatcctcctacaaacttcagttctgccaagtttgcttccttcatcacacagtattccacaggacaagtcggcgtggagattgagtgggagctgcagaaggagaacagcaaacgctggaaccccgagatccagtacacttccaactacaacaaatctgttaatgtggactttactgtggacactaatggcgtgtattcagagcctcgccccattggcaccagatacctgactcgtaatctgtaa

SEQ ID NO: 13009 - DNA, 2208 bp, Artificial Sequence
  source: /note="Description of Artificial Sequence: Synthetic polynucleotide"
atggctgccgatggttatcttccagattggctcgaggacactctctctgaaggaataagacagtggtggaagctcaaacctggcccaccaccgccaaagcccgcagagcggcacaaggacgacagtaggggtcttgtgcttcctgggtacaagtacctcggacccttcaacggactcgacaaaggagagccggtcaacgaggcagacgccgcggccctcgagcacgacaaggcctacgaccggcagctcgacagcggagacaacccgtacctcaagtacaaccacgccgacgcggagtttcaggagcgtcttaaagaagatacgtcttttgggggcaacctcggacgagcagtattccaggcgaaaaagagggttcttgaacctctgggcctggttgaggagcctgttaagacggctccgggaaaaaagaggccggtagagcactctcctgtggagccagactcctcctcgggaaccggaaaagcgggccagcagcctgcaagaaaaagattgaattttggtcagactggagacgcagactccgtacctgacccccagcctctcggacagccaccagcagcccccacaagtttgggatctactacaatggctacaggcagtggcgcaccaatggcagacaataacgagggtgccgatggagtgggtaattcctcaggaaattggcattgcgattcccaatggctgggcgacagagtcatcaccaccagcacccgaacctgggccctgcccacctacaacaaccacctctacaagcaaatctccagccaatcaggagcatcgaacgacaaccactactttggccacagcaccccttgggggtattttgacttcaacagattccactgtcacttctccccacgtgactggcaaagactcatcaacaacaactggggattccgacccaagagactcaacttcaagctctttaacattcaagtcaaagaggtcacgcagaatgacggtacgacgacgattgccaataaccttaccagcacggttcaggtgtttactgactcggagtaccagctcccgtacgtcctcggctcggcgcatcaaggatgcctcccgccgttcccagcagacgtcttcatggtcccacagtatggatacctcaccctgaacaacgggagtcaggcggtaggacgctcttccttttactgcctggagtactttccttctcagatgcttcgtaccggaaacaactttaccttcagctacacctttgaagacgtgcctttccacagtagctacgctcacagccagagtctggatcggctgatgaatcctcttatcgaccagtacctgtattatctaaacaaaacaaacaatcaaagtggaaccttcacgcagtctcggctactgtttagtcaagctggacccaccagcattctcttcaagtctaaaaactggctgcctggaccttgctacagacaacagcgtctgtcaaagcgggcaaacgacaacaacaacagcaactttccctggactgcggctacaaagtatcatctaaatggccgggactcgttggttaatccaggaccagctatggccagccacaaagacgatgaagaaaagttttttccccagcatggaaccctgatatttggtaaacaaggaacaaagctaacagacgcggatttggacaatgtcatgattacagatgaagaagaaatccgcaccaccaatcccgtggctacggagcagtacgggactgtgtcaaataatttgcagaaactcaacatactggcaactactggaactgtcaacacacaaggagcgttacctggtatggtgtggcaggatcgagacgtgtacctgcagggacccatttgggccaagattcctcacaccgatggacactttcatccttctccactgatgggaggttttggactcaaacacccgcctcctcagatcatgatcaaaaacactcccgttccagccaatcctcctacaaacttcagttctgccaagtttgcttccttcatcacacagtattccacgggacaagtcagcgtggagattgagtgggagctgcagaaggagaacagcaaacgctggaaccccgagatccagtacacttccaactacaacaaatctgttaatgtggactttactgtggacactaatggcgtgtattcagagcctcgccccattggcaccagatacctgactcgtaatctgtaa

SEQ ID NO: 13010 - DNA, 2208 bp, Artificial Sequence
  source: /note="Description of Artificial Sequence: Synthetic polynucleotide"
atggctgccgatggttatcttccagattggctcgaggacactctctctgaaggaataagacagtggtggaagctcaaacctggcccaccaccgccaaagcccgcagagcggcacaaggacgccagtaggggtcttgtgcttcctgggtacaagtacctcggacccttcaacggactcgacaaaggagagccggtcaacgaggcagacgccgcggccctcgagcacgacaaggcctacgaccggcagctcgacagcggagacaacccgtacctcaagtacaaccacgccgacgcggagtttcaggagcgtcttaaagaagatacgtcttttgggggcaacctcggacgagcagtattccaggcgaaaaagagggttcttgaacctctgggcctggttgaggagcctgttaagacggctccgggaaaaaagaggccggtagagcactctcctgtggagccagactcctcctcgggaaccggaaaagcgggccagcagcctgcaagaaaaagattgaattttggtcagactggagacgcagactccgtacctgacccccagcctctcggacagccaccagcagcccccacaagtttgggatctactacaatggctacaggcagtggcgcaccaatggcagacaataacgagggtgccgatggagtgggtaattcctcaggaaattggcattgcgattcccaatggctgggcgacagagtcatcaccaccagcacccgaacctgggccctgcccacctacaacaaccacctctacaagcaaatctccagccaatcaggagcatcgaacgacaaccactactttggctacagcaccccttgggggtattttgacttcaacagattccactgtcacttctccccacgtgactggcaaagactcatcaacaacaactggggattccgacccaagagactcaacttcaagctctttaacattcaagtcaaagaggtcacgcagaatgacggtacgacgacgattgccaataaccttaccagcacggttcaggtgtttactgactcggagtaccagctcccgtacgtcctcggctcggcgcatcaaggatgcctcccgccgttcccagcagacgtcttcatggtcccacagtatggatacctcaccctgaacaacgggagtcaggcggtaggacgctcttccttttactgcctggagtactttccttctcagatgcttcgtaccggaaacaactttaccttcagctacacctttgaagacgtgcctttccacagtagctacgctcacagccagagtctggatcggctgatgaatcctcttatcgaccagtacctgtattatctaaacaaaacaaacaatcaaagtggaaccttcacgcagtctcggctactgtttagtcaagctggacccaccagcattctcttcaagtctaaaaactggctgcctggaccttgctacagacaacagcgtctgtcaaagacagcaaacgacaacaacaacagcaactttccctggactgcggctacaaagtatcatctaaatggccgggactcgttggttaatccaggaccagctatggccagccacaaagacgatgaagaaaagttttttccccagcatggaaccctgatatttggtaaacaaggaacaaagctaacagacgcggatttggacaatgtcatgattacagatgaagaagaaatccgcaccaccaatcccgtggctacggagcagtacgggactgtgtcaaataatttgcagaaactcaacatactggcaactactggaactgtcaacacacaaggagcgttacctggtatggtgtggcaggatcgagacgtgtacctgcagggacccatttgggccaagattcctcacaccgatggacactttcatccttctccactgatgggaggttttggactcaaacacccgcctcctcagatcatgatcaaaaacactcccgttccagccaatcctcctacaaacttcagttctgccaagtttgcttccttcatcacacagtattccacgggacaagtcagcgtggagattgagtgggagctgcagaaggagaacagcaaacgctggaaccccgagatccagtacacttccaactacaacaaatctgttaatgtggactttactgtggacactaatggcgtgtattcagagcctcgccccattggcaccagatacctgactcgtaatctgtaa

SEQ ID NO: 13011 - DNA, 2208 bp, Artificial Sequence
  source: /note="Description of Artificial Sequence: Synthetic polynucleotide"
atggctgccgatggttatcttccagattggctcgaggacactctctctgaaggaataagacagtggtggaagctcaaacctggcccaccaccgccaaagcccgcagagcggcacaaggacgacagtaggggtcttgtgcttcctgggtacaagtacctcggacccttcaacggactcgacaaaggagagccggtcaacgaggcagacgccgcggccctcgagcacgacaaggcctacgaccggcagctcgacagcggagacaacccgtacctcaagtacaaccacgccgacgcggagtttcaggagcgtcttaaagaagatacgtcttttgggggcaacctcggacgagcagtattccaggcgaaaaagagggttcttgaacctctgggcctggttgaggagcctgttaagacggctccgggaaaaaagaggccggtagagcactctcctgtggagccagactcctcctcgggaaccggaaaagcgggccagcagcctgcaagaaaaagattgaattttggtcagactggagacgcagactccgtacctgacccccagcctctcggacagccaccagcagcccccacaagtttgggatctactacaatggctacaggcagtggcgcaccaatggcagacaataacgagggtgccgatggagtgggtaattcctcaggaaattggcattgcgattcccaatggctgggcgacagagtcatcaccaccagcacccgaacctgggccctgcccacctacaacaaccacctctacaagcaaatctccagccaatcaggagcatcgaacgacaaccactactttggccacagcaccccttgggggtattttgacttcaacagattccactgtcacttctccccacgtgactggcaaagactcatcaacaacaactggggattccgacccaagagactcaacttcaagctctttaacattcaagtcaaagaggtcacgcagaatgacggtacgacgacgattgccaataaccttaccagcacggttcaggtgtttactgactcggagtaccagctcccgtacgtcctcggctcggcgcatcaaggatgcctcccgccgttcccagcagacgtcttcatggtcccacagtatggatacctcaccctgaacaacgggagtcaggcggtaggacgctcttccttttactgcctggagtactttccttctcagatgcttcgtaccggaaacaactttaccttcagctacacctttgaagacgtgcctttccacagtagctacgctcacagccagagtctggatcggctgatgaatcctcttatcgaccagtacctgtattatctaaacaaaacaaacaatcaaagtggaaccttcacgcagtctcggctactgtttagtcaagctggacccaccagcattctcttcaagtctaaaaactggctgcctggaccttgctacagacaacagcgtctgtcaaagacagcaaacgacaacaacaacagcaactttccctggactgcggctacaaagtatcatctaaatggccgggactcgttggttaatccaggaccagctatggccagccacaaagacgatgaagaaaagttttttccccagcatggaaccctgatatttggtaaacaaggaacaaagctaacagacgcggatttggacaatgtcatgattacagatgaagaagaaatccgcaccaccaatcccgtggctacggagcagtacgggactgtgtcaaataatttgcagaaactcaacatactggcaactactggaactgtcaacacacaaggagcgttacctggtatggtgtggcaggatcgagacgtgtacctgcagggacccatttgggccaagattcctcacaccgatggacactttcatccttctccactgatgggaggttttggactcaaacacccgcctcctcagatcatgatcaaaaacactcccgttccagccaatcctcctacaaacttcagttctgccaagtttgcttccttcatcacacagtattccacgggacaagtcagcgtggagattgagtgggagctgcagaaggagaacagcaaacgctggaaccccgagatccagtacacttccaactacaacaaatctgttaatgtggactttactgtggacactaatggcgtgtattcagagcctcgccccattggcaccagatacctgactcgtaatctgtaa

SEQ ID NO: 13012 - DNA, 2208 bp, Artificial Sequence
  source: /note="Description of Artificial Sequence: Synthetic polynucleotide"
atggctgccgatggttatcttccagattggctcgaggacactctctctgaaggaataagacagtggtggaagctcaaacctggcccaccaccaccaaagcccgcagagcggcatcaggacgacagcaggggtcttgtgcttcctgggtacaagtacctcggacccttcaacggactcgacaaaggagagccggtcaacgaggcagacgctgcggccctcgagcacgacaaggcctacgaccggcagctcgacagcggagacaacccgtacctcaagtacaaccacgccgacgcggagtttcaggagcgtcttaaagaagatacgtcttttgggggcaacctcggacgagcagtcttccaggcgaaaaagagggttcttgaacctctgggcctggttgaggaacctgttaagacggctccgggaaaaaagaggccggtagagcactctcctgcggagccagactcctcctcgggaaccggaaaagcgggccagcagcctgcaagaaagagattgaatttcggtcagactggagacgcagactccgtacctgacccccagcctctcggacagccaccagcagcccccacaagtttgggatctactacaatggctacaggcagtggcgcaccaatggcagacaataacgagggtgccgatggagtgggtaattcctcaggaaattggcattgcgattcccaatggctgggcgacggagtcatcaccaccagcacccgaacctgggccctgcccacctacaacaaccacctctacaagcaaatctccagccaatcaggagcatcgaacgacaaccactactttggctacagcaccccttgggggtattttgacttcaacagattccactgtcacttctccccacgtgactggcaaagactcatcaacaacaactggggattccgacccaagagactcaacttcaagctctttaacattcaagtcaaagaggtcacgcagaatgacggtacgacgacgattgccaataaccttaccagcacggttcaggtgtttactgactcggagtaccagctcccgtacgtcctcggctcggcgcatcaaggatgcctcccgccgtttccagcggacgtcttcatggtcccacagtatggatacctcaccctgaacaacgggagtcaggcggtaggacgctcttccttttactgcctggagtactttccttctcagatgctgcgtaccggaaacaactttaccttcagctacacctttgaggacgtgcctttccacagcagctacgctcacagccagagtttggaccggctgatgaatcctctgatcgaccagtatctgtattatctgaacaggacacaatcaaatagtggaactcttcagcagtctaggctactgtttagccaagctggacccaccagcatgtctcttcaagctaaaaactggctgcctggaccttgctacagacagcagcgtctgtcaaagcaggcaaacgacaacaacaacagcaactttccctggactgcggctacaaagtatcatctaaatggtcgggactcgttggttaatccaggaccagctatggccagccacaaagacgatgaagaaaagtttttccccatgcatggaaccctgatatttggtaaacaaggaacaaatgctaacgacgcggatttggaacatgtcatgattacagatgaagaagaaatcaggaccaccaatcccgtggctacagagcagtacggaaacgtgtcaaataatttgcaaaactcaaatactggtccaactacagaaaatgtcaatcaccagggagcgttacctggtatggtgtggcaggatcgagacgtgtacctgcagggacccatttgggccaagattcctcacaccgacggacactttcacccttctccactgatgggaggttttggactcaaacacccgcctcctcaaatcatgatcaaaaacactcctgttccagccaatcctcctacaaacttcagcgcggcaaagtttgcttccttcatcacacagtattccacgggacaggtcagcgtggagatcgagtgggagctgcagaaggagaacagcaaacgctggaaccccgagatccagtacacttccaactacaacaaatctgttaatgtggactttactgtggacactaatggtgtgtattcagagcctcgccccattggcaccagatacctgactcgtaatctgtaa

SEQ ID NO: 13013 - DNA, 2208 bp, Artificial Sequence
  source: /note="Description of Artificial Sequence: Synthetic polynucleotide"
atggctgccgatggttatcttccagattggctcgaggacactctctctgaaggaataagacagtggtggaagctcaaacctggcccaccaccaccaaagcccgcagagcggcatcaggacgacagcaggggtcttgtgcttcctgggtacaagtacctcggacccttcaacggactcgacaaaggagagccggtcaacgaggcagacgctgcggccctcgagcacgacaaggcctacgaccggcagctcgacagcggagacaacccgtacctcaagtacaaccacgccgacgcggagtttcaggagcgtcttaaagaagatacgtcttttgggggcaacctcggacgagcagtcttccaggcgaaaaagagggttcttgaacctctgggcctggttgaggaacctgttaagacggctccgggaaaaaagaggccggtagagcactctcctgcggagccagactcctcctcgggaaccggaaaagcgggccagcagcctgcaagaaagagattgaatttcggtcagactggagacgcagactccgtacctgacccccagcctctcggacagccaccagcagcccccacaagtttgggatctactacaatggctacaggcagtggcgcaccaatggcagacaataacgagggtgccgatggagtgggtaattcctcaggaaattggcattgcgattcccaatggctgggcgacagagtcatcaccaccagcacccgaacctgggccctgcccacctacaacaaccacctctacaagcaaatctccagccaatcaggagcatcgaacgacaaccactactttggctacagcaccccttgggggtattttgacttcaacagattccactgtcacttctccccacgtgactggcaaagactcatcaacaacaactggggattccgacccaagagactcaacttcaagctctttaacattcaagtcaaagaggtcacgcagaatgacggtacgacgacgattgccaataaccttaccagcacggttcaggcgtttactgactcggagtaccagctcccgtacgtcctcggctcggcgcatcaaggatgcctcccgccgtttccagcggacgtcttcatggtcccacagtatggatacctcaccctgaacaacgggagtcaggcggtaggacgctcttccttttactgcctggagtactttccttctcagatgctgcgtaccggaaacaactttaccttcagctacacctttgaggacgtgcctttccacagcagctacgctcacagccagagtttggaccggctgatgaatcctctgatcgaccagtatctgtattatctgaacaggacacaatcaaatagtggaactcttcagcagtctaggctactgtttagccaagctggacccaccagcatgtctcttcaagctaaaaactggctgcctggaccttgctacagacagcagcgtctgtcaaagcaggcaaacgacaacaacaacagcaactttccctggactgcggctacaaagtatcatctaaatggtcgggactcgttggttaatccaggaccagctatggccagccacaaagacgatgaagaaaagtttttccccatgcatggaaccctgatatttggtaaacaaggaacaaatgctaacgacgcggatttggaacatgtcatgattacagatgaagaagaaatcaggaccaccaatcccgtggctacagagcagtacggaaacgtgtcaaataatttgcaaaactcaaatactggtccaactacagaaaatgtcaatcaccagggagcgttacctggtatggtgtggcaggatcgagacgtgtacctgcagggacccatttgggccaagattcctcacaccgacggacactttcacccttctccactgatgggaggttttggactcaaacacccgcctcctcaaatcatgatcaaaaacactcctgttccagccaatcctcctacaaacttcagcgcggcaaagtttgcttccttcatcacacagtattccacgggacaggtcagcgtggagatcgagtgggagctgcagaaggagaacagcaaacgctggaaccccgagatccagtacacttccaactacaacaaatctgttaatgtggactttactgtggacactaatggtgtgtattcagagcctcgccccattggcaccagatacctgactcgtaatctgtaa

SEQ ID NO: 13014 - DNA, 2208 bp, Artificial Sequence
  source: /note="Description of Artificial Sequence: Synthetic polynucleotide"
atggctgccgatggttatcttccagattggctcgaggacactctctctgaaggaataagacagtggtggaagctcaaacctggcccaccaccaccaaagcccgcagagcggcatcaggacgacagcaggggtcttgtgcttcctgggtacaagtacctcggacccttcaacggactcgacaaaggagagccggtcaacgaggcagacgctgcggccctcgagcacgacaaggcctacgaccggcagctcgacagcggagacaacccgtacctcaagtacaaccacgccgacgcggagtttcaggagcgtcttaaagaagatacgtcttttgggggcaacctcggacgagcagtcttccaggcgaaaaagagggttcttgaacctctgggcctggttgaggaacctgttaagacggctccgggaaaaaagaggccggtagagcactctcctgcggagccagactcctcctcgggaaccggaaaagcgggccagcagcctgcaagaaagagattgaatttcggtcagactggagacgcagactccgtacctgacccccagcctctcggacagccaccagcagcccccacaagtttgggatctactacaatggctacaggcagtggcgcaccaatggcagacaataacgagggtgccgatggagtgggtaattcctcaggaaattggcattgcgattcccaatggctgggcgacagagtcatcaccaccagcacccgaacctgggccctgcccacctacaacaaccacctctacaagcaaatctccagccaatcaggagcatcgaacgacaaccactactttggctacagcaccccttgggggtattttgacttcaacagattccactgtcacttctccccacgtgactggcaaagactcatcaacaacaactggggattccgacccaagagactcaacttcaagctctttaacattcaagtcaaagaggtcacgcagaatgacggtacgacgacgattgccaataaccttaccagcacggttcaggtgtttactgactcggagtaccagctcccgtacgtcctcggctcggcgcatcaaggatgcctcccgccgtttccagcggacgtcttcatggtcccacagtatggatacctcaccctgaacaacgggagtcaggcggtaggacgctcttccttttactgcctggagtactttccttctcagatgctgcgtaccggaaacaactttaccttcagctacacctttgaggacgtgcctttccacagcagctacgctcacagccagagtttggaccggctgatgaatcctctgatcgaccagtatctgtattatctgaacaggacacaatcaaatagtggaactcttcagcagtctaggctactgtttagccaagctggacccaccagcatgtctcttcaagctaaaaactggctgcctggaccttgctacagacagcagcgtctgtcaaagcaggcaaacgacaacaacaacagcaactttccctggactgcggctacaaagtatcatctaaatggtcgggactcgttggttaatccaggaccagctatggccagccacaaagacgatgaagaaaagtttttccccatgcatggaaccctgatatttggtaaacaaggaacaaatgctaacgacgcggatttggaacatgtcatgattacagatgaagaagaaatcaggaccaccaatcccgtggctacagagcagtacggaaacgtgtcaaataatttgcaaaactcaaatactggtccaactacagaaaatgtcaatcaccagggagcgttacctggtatggtgtggcaggatcgagacgtgtacctgcagggacccatttgggccaagattcctcacaccgacggacactttcacccttctccactgatgggaggttttggactcaaacacccgcctcctcaaatcatgatcaaaaacactcctgttccagccaatcctcctacaaacttcagcgcggcaaagtttgcttccttcatcacacagtattccacgggacaggtcagcgtggagatcgagtgggagctgcagaaggggaacagcaaacgctggaaccccgagatccagtacacttccaactacaacaaatctgttaatgtggactttactgtggacactaatggtgtgtattcagagcctcgccccattggcaccagatacctgactcgtaatctgtaa

SEQ ID NO: 13015 - DNA, 2208 bp, Artificial Sequence
  source: /note="Description of Artificial Sequence: Synthetic polynucleotide"
atggctgccgatggttatcttccagattggctcgaggacactctctctgaaggaataagacagtggtggaagctcaaacctggcccaccaccaccaaagcccgcagagcggcatcaggacgacagcaggggtcttgtgcttcctgggtacaagtacctcggacccttcaacggactcgacaaaggagagccggtcaacgaggcagacgctgcggccctcgagcacgacaaggcctacgaccggcagctcgacagcggagacaacccgtacctcaagtacaaccacgccgacgcggagtttcaggagcgtcttaaagaagatacgtcttttgggggcaacctcggacgagcagtcttccaggcgaaaaagagggttcttgaacctctgggcctggttgaggaacctgttaagacggctccgggaaaaaagaggccggtagagcactctcctgcggagccagactcctcctcgggaaccggaaaagcgggccagcagcctgcaagaaagagattgaatttcggtcagactggagacgcagactccgtacctgacccccagcctctcggacagccaccagcagcccccacaagtttgggatctactacaatggctacaggcagtggcgcaccaatggcagacaataacgagggtgccgatggagtgggtaattcctcaggaaattggcattgcgattcccaatggctgggcgacagagtcatcaccaccagcacccgaacctgggccctgcccacctacaacaaccacctctacaagcaaatctccagccaatcaggagcatcgaacgacaaccactactttggctacagcaccccttgggggtattttgacttcaacagattccactgtcacttctccccacgtgactggcaaagactcatcaacaacaactggggattccgacccaagagactcaacttcaagctctttaacattcaagtcaaagaggtcacgcagaatgacggtacgacgacgattgccaataaccttaccagcacggttcaggtgtttactgactcggagtaccagctcccgtacgtcctcggctcggcgcatcaaggatgcctcccgccgtttccagcggacgtcttcatggtcccacagtatggatacctcaccctgaacaacgggagtcaggcggtaggacgctcttccttttactgcctggagtactttccttctcagatgctgcgtaccggaaacaactttaccttcagctacacctttgaggacgtgcctttccacagcagctacgctcacagccagagtttggaccggctgatgaatcctctgatcgaccagtatctgtattatctgaacaggacacaatcaaatagtggaactcttcagcagtctaggctactgtttagccaagctggacccaccagcatgtctcttcaagctaaaaactggctgcctggaccttgctacagacagcagcgtctgtcaaagcaggcaaacgacaacaacaacagcaactttccctggactgcggctacaaagtatcatctaaatggtcgggactcgttggttaatccaggaccagctatggccagccacaaagacgatgaagaaaagtttttccccatgcatggaaccctgatatttggtaaacaaggaacaaatgctaacgacgcggatttggaacatgtcatgattacagatgaagaagaaatcaggaccaccaatcccgtggctacagagcagtacggaaacgtgtcaaataatttgcaaaactcaaatactggtccaactacagaaaatgtcaatcaccagggagcgttacctggtatggtgtggcaggatcgagacgtgtacctgcagggacccatttgggccaagattcctcacaccgacggacactttcacccttctccactgatgggaggttttggactcaaacacccgcctcctcaaatcatgatcaaaaacactcctgttccagccaatcctcctacaaacttcagcgcggcaaagtttgcttccttcatcacacagtattccacgggacaggtcagcgtggagatcgagtgggggctgcagaaggagaacagcaaacgctggaaccccgagatccagtacacttccaactacaacaaatctgttaatgtggactttactgtggacactaatggtgtgtattcagagcctcgccccattggcaccagatacctgactcgtaatctgtaa

SEQ ID NO: 13016 - DNA, 2208 bp, Artificial Sequence
  source: /note="Description of Artificial Sequence: Synthetic polynucleotide"
atggctgccgatggttatcttccagattggctcgaggacactctctctgaaggaataagacagtggtggaagctcaaacctggcccaccaccaccaaagcccgcagagcggcatcaggacgacagcaggggtcttgtgcttcctgggtacaagtacctcggacccttcaacggactcgacaaaggagagccggtcaacgaggcagacgctgcggccctcgagcacgacaaggcctacgaccggcagctcgacagcggagacaacccgtacctcaagtacaaccacgccgacgcggagtttcaggagcgtcttaaagaagatacgtcttttgggggcaacctcggacgagcagtcttccaggcgaaaaagagggttcttgaacctctgggcctggttgaggaacctgttaagacggctccgggaaaaaagaggccggtagagcactctcctgcggagccagactcctcctcgggaaccggaaaagcgggccagcagcctgcaagaaagagattgaatttcggtcagactggagacgcagactccgtacctgacccccagcctctcggacagccaccagcagcccccacaagtttgggatctactacaatggctacaggcagtggcgcaccaatggcagacaataacgagggtgccgatggagtgggtaattcctcaggaaattggcattgcgattcccaatggctgggcgacagagtcatcaccaccagcacccgaacctgggccctgcccacctacaacaaccacctctacaagcaaatctccagccaatcaggagcatcgaacgacaaccactactttggctacagcaccccttgggggtattttgacttcaacagattccactgtcacttctccccacgtgactggcaaagactcatcaacaacaactggggattccgacccaagagactcaacttcaagctctttaacattcaagtcaaagaggtcacgcagaatgacggtacgacgacgattgccaataaccttaccagcacggttcaggtgtttactgactcggagtaccagctcccgtacgtcctcggctcggcgcatcaaggatgcctcccgccgtttccagcggacgtcttcatggtcccacagtatggatacctcaccctgaacaacgggagtcaggcggtaggacgctcttccttttactgcctggagtactttccttctcagatgctgcgtaccggaaacaactttaccttcagctacacctttgaggacgtgcctttccacagcagctacgctcacagccagagtttggaccggctgatgaatcctctgatcgaccagtatctgtattatctgaacaggacacgatcaaatagtggaactcttcagcagtctaggctactgtttagccaagctggacccaccagcatgtctcttcaagctaaaaactggctgcctggaccttgctacagacagcagcgtctgtcaaagcaggcaaacgacaacaacaacagcaactttccctggactgcggctacaaagtatcatctaaatggtcgggactcgttggttaatccaggaccagctatggccagccacaaagacgatgaagaaaagtttttccccatgcatggaaccctgatatttggtaaacaaggaacaaatgctaacgacgcggatttggaacatgtcatgattacagatgaagaagaaatcaggaccaccaatcccgtggctacagagcagtacggaaacgtgtcaaataatttgcaaaactcaaatactggtccaactacagaaaatgtcaatcaccagggagcgttacctggtatggtgtggcaggatcgagacgtgtacctgcagggacccatttgggccaagattcctcacaccgacggacactttcacccttctccactgatgggaggttttggactcaaacacccgcctcctcaaatcatgatcaaaaacactcctgttccagccaatcctcctacaaacttcagcgcggcaaagtttgcttccttcatcacacagtattccacgggacaggtcagcgtggagatcgagtgggagctgcagaaggagaacagcaaacgctggaaccccgagatccagtacacttccaactacaacaaatctgttaatgtggactttactgtggacactaatggtgtgtattcagagcctcgccccattggcaccagatacctgactcgtaatctgtaa

SEQ ID NO: 13017 - DNA, 2208 bp, Artificial Sequence
  source: /note="Description of Artificial Sequence: Synthetic polynucleotide"
atggctgccgatggttatcttccagattggctcgaggacactctctctgaaggaataagacagtggtggaagctcaaacctggcccaccaccaccaaagcccgcagagcggcatcaggacgacagcaggggtcttgtgcttcctgggtacaagtacctcggacccttcaacggactcgacaaaggagagccggtcaacgaggcagacgctgcggccctcgagcacgacaaggcctacgaccggcagctcgacagcggagacaacccgtacctcaagtacaaccacgccgacgcggagtttcaggagcgtcttaaagaagatacgtcttttgggggcaacctcggacgagcagtcttccaggcgaaaaagagggttcttgaacctctgggcctggttgaggaacctgttaagacggctccgggaaaaaagaggccggtagagcactctcctgcggagccagactcctcctcgggaaccggaaaagcgggccagcagcctgcaagaaagagattgaatttcggtcagactggagacgcagactccgtacctgacccccagcctctcggacagccaccagcagcccccacaagtttgggatctactacaatggctacaggcagtggcgcaccaatggcagacaataacgagggtgccgatggagtgggtaattcctcaggaaattggcattgcgattcccaatggctgggcgacagagtcatcaccaccagcacccgaacctgggccctgcccacctacaacaaccacctctacaagcaaatctccagccaatcaggagcatcgaacgacaaccactactttggctacagcaccccttgggggtattttgacttcaacagattccactgtcacttctccccacgtgactggcaaagactcatcaacaacaactggggattccgacccaagagactcaacttcaagctctttaacattcaagtcaaagaggtcacgcagaatgacggtacgacgacgattgccaataaccttaccagcacggttcaggtgtttactgactcggagtaccagctcccgtacgtcctcggctcggcgcatcaaggatgcctcccgccgtttccagcggacgtcttcatggtcccacagtatggatacctcaccctgaacaacgggagtcaggcggtaggacgctcttccttttactgcctggagtactttccttctcagatgctgcgtaccggaaacaactttaccttcagctacacctttgaggacgtgcctttccacagcagctacgctcacagccagagtttggaccggctgatgaatcctctgatcgaccagtatctgtattatctgaacaggacacaatcaaatagtggaactcttcagcagtctaggctactgtttagccaagctggacccaccagcatgtctcttcaagctaaaaactggctgcctggaccttgctacagacagcagcgtctgtcaaagcaggcaaacgacaacaacaacagcaactttccctggactgcggctacaaagtatcatctaaatggtcgggactcgttggttaatccaggaccagctatggccagccacaaagacgatgaagaaaagtttttccccatgcatggaaccctgatatttggtaaacaaggaacaaatgctaacgacgcggatttggaacatgtcatgattacagatgaagaagaaatcaggaccaccaatcccgtggctacagagcagtacggaaacgtgtcaaataatttgcaaaactcaaatactggtccaactacagaaaatgtcaatcaccagggagcgttacctggtatggtgtggcaggatcgaggcgtgtacctgcagggacccatttgggccaagattcctcacaccgacggacactttcacccttctccactgatgggaggttttggactcaaacacccgcctcctcaaatcatgatcaaaaacactcctgttccagccaatcctcctacaaacttcagcgcggcaaagtttgcttccttcatcacacagtattccacgggacaggtcagcgtggagatcgagtgggagctgcagaaggagaacagcaaacgctggaaccccgagatccagtacacttccaactacaacaaatctgttaatgtggactttactgtggacactaatggtgtgtattcagagcctcgccccattggcaccagatacctgactcgtaatctgtaa

SEQ ID NO: 13018 - DNA, 2208 bp, Artificial Sequence
  source: /note="Description of Artificial Sequence: Synthetic polynucleotide"
atggctgccgatggttatcttccagattggctcgaggacactctctctgaaggaataagacagtggtggaagctcaaacctggcccaccaccaccaaagcccgcagagcggcatcaggacgacagcaggggtcttgtgcttcctgggtacaagtacctcggacccttcaacggactcgacaaaggagagccggtcaacgaggcagacgctgcggccctcgagcacgacaaggcctacgaccggcagctcgacagcggagacaacccgtacctcaagtacaaccacgccgacgcggagtttcaggagcgtcttaaagaagatacgtcttttgggggcaacctcggacgagcagtcttccaggcgaaaaagagggttcttgaacctctgggcctggttgaggaacctgttaagacggctccgggaaaaaagaggccggtagagcactctcctgcggagccagactcctcctcgggaaccggaaaagcgggccagcagcctgcaagaaagagattgaatttcggtcagactggagacgcagactccgtacctgacccccagcctctcggacagccaccagcagcccccacaagtttgggatctactacaatggctacaggcagtggcgcaccaatggcagacaataacgagggtgccgatggagtgggtaattcctcaggaaattggcattgcgattcccaatggctgggcgacagagtcatcaccaccagcacccgaacctgggccctgcccacctacaacaaccacctctacaagcaaatctccagccaatcaggagcatcgaacgacaaccactactttggctacagcaccccttgggggtattttgacttcaacagattccactgtcacttctccccacgtgactggcaaagactcatcaacaacaactggggattccgacccaagagactcaacttcaagctctttaacattcaagtcaaagaggtcacgcagaatggcggtacgacgacgattgccaataaccttaccagcacggttcaggtgtttactgactcggagtaccagctcccgtacgtcctcggctcggcgcatcaaggatgcctcccgccgtttccagcggacgtcttcatggtcccacagtatggatacctcaccctgaacaacgggagtcaggcggtaggacgctcttccttttactgcctggagtactttccttctcagatgctgcgtaccggaaacaactttaccttcagctacacctttgaggacgtgcctttccacagcagctacgctcacagccagagtttggaccggctgatgaatcctctgatcgaccagtatctgtattatctgaacaggacacaatcaaatagtggaactcttcagcagtctaggctactgtttagccaagctggacccaccagcatgtctcttcaagctaaaaactggctgcctggaccttgctacagacagcagcgtctgtcaaagcaggcaaacgacaacaacaacagcaactttccctggactgcggctacaaagtatcatctaaatggtcgggactcgttggttaatccaggaccagctatggccagccacaaagacgatgaagaaaagtttttccccatgcatggaaccctgatatttggtaaacaaggaacaaatgctaacgacgcggatttggaacatgtcatgattacagatgaagaagaaatcaggaccaccaatcccgtggctacagagcagtacggaaacgtgtcaaataatttgcaaaactcaaatactggtccaactacagaaaatgtcaatcaccagggagcgttacctggtatggtgtggcaggatcgagacgtgtacctgcagggacccatttgggccaagattcctcacaccgacggacactttcacccttctccactgatgggaggttttggactcaaacacccgcctcctcaaatcatgatcaaaaacactcctgttccagccaatcctcctacaaacttcagcgcggcaaagtttgcttccttcatcacacagtattccacgggacaggtcagcgtggagatcgagtgggagctgcagaaggagaacagcaaacgctggaaccccgagatccagtacacttccaactacaacaaatctgttaatgtggactttactgtggacactaatggtgtgtattcagagcctcgccccattggcaccagatacctgactcgtaatctgtaa

SEQ ID NO: 13019 - DNA, 2208 bp, Artificial Sequence
  source: /note="Description of Artificial Sequence: Synthetic polynucleotide"
atggctgccgatggttatcttccagattggctcgaggacactctctctgaaggaataagacagtggtggaagctcaaacctggcccaccaccaccaaagcccgcagagcggcatcaggacgacagcaggggtcttgtgcttcctgggtacaagtacctcggacccttcaacggactcgacaaaggagagccggtcaacgaggcagacgctgcggccctcgagcacgacaaggcctacgaccggcagctcgacagcggagacaacccgtacctcaagtacaaccacgccgacgcggagtttcaggagcgtcttaaagaagatacgtcttttgggggcaacctcggacgagcagtcttccaggcgaaaaagagggttcttgaacctctgggcctggttgaggaacctgttaagacggctccgggaaaaaagaggccggtagagcactctcctgcggagccagactcctcctcgggaaccggaaaagcgggccagcagcctgcaagaaagagattgaatttcggtcagactggagacgcagactccgtacctgacccccagcctctcggacagccaccagcagcccccacaagtttgggatctactacaatggctacaggcagtggcgcaccaatggcagacaataacgagggtgccgatggagtgggtaattcctcaggaaattggcattgcgattcccaatggctgggcgacagagtcatcaccaccagcacccgaacctgggccctgcccacctacaacaaccacctctacaagcaaatctccagccaatcaggagcatcgaacgacaaccactactttggctacagcaccccttgggggtattttgacttcaacagattccactgtcacttctccccacgtgactggcaaagactcatcaacaacaactggggattccgacccaagagactcaacttcaagctctttaacattcaagtcaaagaggtcacgcagaatgacggtacgacgacgattgccaataaccttaccagcacggttcaggtgtttactgactcggagtaccagctcccgtacgtcctcggctcggcgcatcaaggatgcctcccgccgtttccagcggacgtcttcatggtcccacagtatggatacctcaccctgaacaacgggagtcaggcggtaggacgctcttccttttactgcctggagtactttccttctcagatgctgcgtaccggaaacaactttaccttcagctacacctttgaggacgtgcctttccacagcagctacgctcacagccagagtttggaccggctgatgaatcctctgatcgaccagtatctgtattatctgaacaggacacaatcaaatagtggaactcttcagcagtctaggctactgtttagccaagctggacccaccagcatgtctcttcaagctaaaaactggctgcctggaccttgctacagacagcagcgtctgtcaaagcaggcaaacgacaacaacaacagcaactttccctggactgcggctacaaagtatcatctaaatggtcgggactcgttggttaatccaggaccagctatggccagccacaaagacgatgaagaaaagtttttccccatgcatggaaccctgatatttggtaaacaaggaacaaatgctaacgacgcggatttggaacatgtcatgattacagatgaagaagaaatcaggaccaccaatcccgtggctacagagcagtacggaaacgtgtcaaataatttgcaaaactcaaatactggtccaactacagaaaatgtcaatcaccagggagcgttacctggtatggtgtggcaggatcgagacgtgtacctgcagggacccatttgggccaagattcctcacaccgacggacactttcacccttctccactgatgggaggttttggactcaaacacccgcctcctcaaatcatgatcaaaaacactcctgttccagccaatcctcctacaaacttcagcgcggcaaagtttgcttccttcatcacacagtattccacgggacaggtcagcgtggagatcgagtgggagctgcggaaggagaacagcaaacgctggaaccccgagatccagtacacttccaactacaacaaatctgttaatgtggactttactgtggacactaatggcgtgtattcagagcctcgccccattggcaccagatacctgactcgtaatctgtaa

SEQ ID NO: 13020 - DNA, 2208 bp, Artificial Sequence
  source: /note="Description of Artificial Sequence: Synthetic polynucleotide"
atggctgccgatggttatcttccagattggctcgaggacactctctctgaaggaataagacagtggtggaagctcaaacctggcccaccaccaccaaagcccgcagagcggcatcaggacgacagcaggggtcttgtgcttcctgggtacaagtacctcggacccttcaacggactcgacaaaggagagccggtcaacgaggcagacgctgcggccctcgagcacgacaaggcctacgaccggcagctcgacagcggagacaacccgtacctcaagtacaaccacgccgacgcggagtttcaggagcgtcttaaagaagatacgtcttttgggggcaacctcggacgagcagtcttccaggcgaaaaggagggttcttgaacctctgggcctggttgaggaacctgttaagacggctccgggaaaaaagaggccggtagagcactctcctgcggagccagactcctcctcgggaaccggaaaagcgggccagcagcctgcaagaaagagattgaatttcggtcagactggagacgcagactccgtacctgacccccagcctctcggacagccaccagcagcccccacaagtttgggatctactacaatggctacaggcagtggcgcaccaatggcagacaataacgagggtgccgatggagtgggtaattcctcaggaaattggcattgcgattcccaatggctgggcgacagagtcatcaccaccagcacccgaacctgggccctgcccacctacaacaaccacctctacaagcaaatctccagccaatcaggagcatcgaacgacaaccactactttggctacagcaccccttgggggtattttgacttcaacagattccactgtcacttctccccacgtgactggcaaagactcatcaacaacaactggggattccgacccaagagactcaacttcaagctctttaacattcaagtcaaagaggtcacgcagaatgacggtacgacgacgattgccaataaccttaccagcacggttcaggtgtttactgactcggagtaccagctcccgtacgtcctcggctcggcgcatcaaggatgcctcccgccgtttccagcggacgtcttcatggtcccacagtatggatacctcaccctgaacaacgggagtcaggcggtaggacgctcttccttttactgcctggagtactttccttctcagatgctgcgtaccggaaacaactttaccttcagctacacctttgaggacgtgcctttccacagcagctacgctcacagccagagtttggaccggctgatgaatcctctgatcgaccagtatctgtattatctgaacaggacacaatcaaatagtggaactcttcagcagtctaggctactgtttagccaagctggacccaccagcatgtctcttcaagctaaaaactggctgcctggaccttgctacagacagcagcgtctgtcaaagcaggcaaacgacaacaacaacagcaactttccctggactgcggctacaaagtatcatctaaatggtcgggactcgttggttaatccaggaccagctatggccagccacaaagacgatgaagaaaagtttttccccatgcatggaaccctgatatttggtaaacaaggaacaaatgctaacgacgcggatttggaacatgtcatgattacagatgaagaagaaatcaggaccaccaatcccgtggctacagagcagtacggaaacgtgtcaaataatttgcaaaactcaaatactggtccaactacagaaaatgtcaatcaccagggagcgttacctggtatggtgtggcaggatcgagacgtgtacctgcagggacccatttgggccaagattcctcacaccgacggacactttcacccttctccactgatgggaggttttggactcaaacacccgcctcctcaaatcatgatcaaaaacactcctgttccagccaatcctcctacaaacttcagcgcggcaaagtttgcttccttcatcacacagtattccacgggacaggtcagcgtggagatcgagtgggagctgcagaaggagaacagcaaacgctggaaccccgagatccagtacacttccaactacaacaaatctgttaatgtggactttactgtggacactaatggtgtgtattcagagcctcgccccattggcaccagatacctgactcgtaatctgtaa

SEQ ID NO: 13021 - DNA, 2208 bp, Artificial Sequence
  source: /note="Description of Artificial Sequence: Synthetic polynucleotide"
atggctgccgatggttatcttccagattggctcgaggacactctctctgaaggaataagacagtggtggaagctcaaacctggcccaccaccaccaaagcccgcagagcggcatcaggacgacagcaggggtcttgtgcttcctgggtacaagtacctcggacccttcaacggactcgacaaaggagagccggtcaacgaggcagacgctgcggccctcgagcacgacaaggcctacgaccggcagctcgacagcggagacaacccgtacctcaagtacaaccacgccgacgcggagcttcaggagcgtcttaaagaagatacgtcttttgggggcaacctcggacgagcagtcttccaggcgaaaaagagggttcttgaacctctgggcctggttgaggaacctgttaagacggctccgggaaaaaagaggccggtagagcactctcctgcggagccagactcctcctcgggaaccggaaaagcgggccagcagcctgcaagaaagagattgaatttcggtcagactggagacgcagactccgtacctgacccccagcctctcggacagccaccagcagcccccacaagtttgggatctactacaatggctacaggcagtggcgcaccaatggcagacaataacgagggtgccgatggagtgggtaattcctcaggaaattggcattgcgattcccaatggctgggcgacagagtcatcaccaccagcacccgaacctgggccctgcccacctacaacaaccacctctacaagcaaatctccagccaatcaggagcatcgaacgacaaccactactttggctacagcaccccttgggggtattttgacttcaacagattccactgtcacttctccccacgtgactggcaaagactcatcaacaacaactggggattccgacccaagagactcaacttcaagctctttaacattcaagtcaaagaggtcacgcagaatgacggtacgacgacgattgccaataaccttaccagcacggttcaggtgtttactgactcggagtaccagctcccgtacgtcctcggctcggcgcatcaaggatgcctcccgccgtttccagcggacgtcttcatggtcccacagtatggatacctcaccctgaacaacgggagtcaggcggtaggacgctcttccttttactgcctggagtactttccttctcagatgctgcgtaccggaaacaactttaccttcagctacacctttgaggacgtgcctttccacagcagctacgctcacagccagagtttggaccggctgatgaatcctctgatcgaccagtatctgtattatctgaacaggacacaatcaaatagtggaactcttcagcagtctaggctactgtttagccaagctggacccaccagcatgtctcttcaagctaaaaactggctgcctggaccttgctacagacagcagcgtctgtcaaagcaggcaaacgacaacaacaacagcaactttccctggactgcggctacaaagtatcatctaaatggtcgggactcgttggttaatccaggaccagctatggccagccacaaagacgatgaagaaaagtttttccccatgcatggaaccctgatatttggtaaacaaggaacaaatgctaacgacgcggatttggaacatgtcatgattacagatgaagaagaaatcaggaccaccaatcccgtggctacagagcagtacggaaacgtgtcaaataatttgcaaaactcaaatactggtccaactacagaaaatgtcaatcaccagggagcgttacctggtatggtgtggcaggatcgagacgtgtacctgcagggacccatttgggccaagattcctcacaccgacggacactttcacccttctccactgatgggaggttttggactcaaacacccgcctcctcaaatcatgatcaaaaacactcctgttccagccaatcctcctacaaacttcagcgcggcaaagtttgcttccttcatcacacagtattccacgggacaggtcagcgtggagatcgagtgggagctgcagaaggagaacagcaaacgctggaaccccgagatccagtacacttccaactacaacaaatctgttaatgtggactttactgtggacactaatggtgtgtattcagagcctcgccccattggcaccagatacctgactcgtaatctgtaa

SEQ ID NO: 13022 - DNA, 2208 bp, Artificial Sequence
  source: /note="Description of Artificial Sequence: Synthetic polynucleotide"
atggctgccgatggttatcttccagattggctcgaggacactctctctgaaggaataagacagtggtggaagctcaaacctggcccaccaccaccaaagcccgcagagcggcatcaggacgacagcaggggtcttgtgcttcctgggtacaagtacctcggacccttcaacggactcgacaaaggagagccggtcaacgaggcagacgctgcggccctcgagcacgacaaggcctacgaccggcagctcgacagcggagacaacccgtacctcaagtacaaccacgccgacgcggagtttcaggagcgtcttaaagaagatacgtcttttgggggcaacctcggacgagcagtcttccaggcgaaaaagagggttcttgaacctctgggcctggttgaggaacctgttaagacggctccgggaaaaaagaggccggtagagcactctcctgcggagccagactcctcctcgggaaccggaaaagcgggccagcagcctgcaagaaagagattgaatttcggtcagactggagacgcagactccgtacctgacccccagcctctcggacagccaccagcagcccccacaagtttgggatctactacaatggctacaggcagtggcgcaccaatggcagacaataacgagggtgccgatggagtgggtaattcctcaggaaattggcattgcgattcccaatggctgggcggcagagtcatcaccaccagcacccgaacctgggccctgcccacctacaacaaccacctctacaagcaaatctccagccaatcaggagcatcgaacgacaaccactactttggctacagcaccccttgggggtattttgacttcaacagattccactgtcacttctccccacgtgactggcaaagactcatcaacaacaactggggattccgacccaagagactcaacttcaagctctttaacattcaagtcaaagaggtcacgcagaatgacggtacgacgacgattgccaataaccttaccagcacggttcaggtgtttactgactcggagtaccagctcccgtacgtcctcggctcggcgcatcaaggatgcctcccgccgtttccagcggacgtcttcatggtcccacagtatggatacctcaccctgaacaacgggagtcaggcggtaggacgctcttccttttactgcctggagtactttccttctcagatgctgcgtaccggaaacaactttaccttcagctacacctttgaggacgtgcctttccacagcagctacgctcacagccagagtttggaccggctgatgaatcctctgatcgaccagtatctgtattatctgaacaggacacaatcaaatagtggaactcttcagcagtctaggctactgtttagccaagctggacccaccagcatgtctcttcaagctaaaaactggctgcctggaccttgctacagacagcagcgtctgtcaaagcaggcaaacgacaacaacaacagcaactttccctggactgcggctacaaagtatcatctaaatggtcgggactcgttggttaatccaggaccagctatggccagccacaaagacgatgaagaaaagtttttccccatgcatggaaccctgatatttggtaaacaaggaacaaatgctaacgacgcggatttggaacatgtcatgattacagatgaagaagaaatcaggaccaccaatcccgtggctacagagcagtacggaaacgtgtcaaataatttgcaaaactcaaatactggtccaactacagaaaatgtcaatcaccagggagcgttacctggtatggtgtggcaggatcgagacgtgtacctgcagggacccatttgggccaagattcctcacaccgacggacactttcacccttctccactgatgggaggttttggactcaaacacccgcctcctcaaatcatgatcaaaaacactcctgttccagccaatcctcctacaaacttcagcgcggcaaagtttgcttccttcatcacacagtattccacgggacaggtcagcgtggagatcgagtgggagctgcagaaggagaacagcaaacgctggaaccccgagatccagtacacttccaactacaacaaatctgttaatgtggactttactgtggacactaatggtgtgtattcagagcctcgccccattggcaccagatacctgactcgtaatctgtaa

SEQ ID NO: 13023 - DNA, 2208 bp, Artificial Sequence
  source: /note="Description of Artificial Sequence: Synthetic polynucleotide"
atggctgccgatggttatcttccagattggctcgaggacactctctctgaaggaataagacagtggtggaagctcaaacctggcccaccaccaccaaagcccgcagagcggcatcaggacgacagcaggggtcttgtgcttcctgggtacaagtacctcggacccttcaacggactcgacaaaggagagccggtcaacgaggcagacgctgcggccctcgagcacgacaaggcctacgaccggcagctcgacagcggagacaacccgtacctcaagtacaaccacgccgacgcggagtttcaggagcgtcttaaagaagatacgtcttttgggggcaacctcggacgagcagtcttccaggcgaaaaagagggttcttgaacctctgggcctggttgaggaacctgttaagacggctccgggaaaaaagaggccggtagagcactctcctgcggagccagactcctcctcgggaaccggaaaagcgggccagcagcctgcaagaaagagattgaatttcggtcagactggagacgcagactccgtacctgacccccagcctctcggacagccaccagcagcccccacaagtttgggatctactacaatggctacaggcagtggcgcaccaatggcagacaataacgagggtgccgatggagtgggtaattcctcaggaaattggcattgcgattcccaatggctgggcgacagagtcatcaccaccagcacccgaacctgggccctgcccacctacaacaaccacctctacaagcaaatctccagccaatcaggagcatcgaacgacaaccactactttggctacagcaccccttgggggtattttgacttcaacagattccactgtcacttctccccacgtgactggcaaagactcatcaacaacaactggggattccgacccaagagactcaacttcaagctctttaacattcaagtcaaagaggtcacgcagaatgacggtacgacgacgattgccaataaccttaccagcacggttcaggtgtttactgactcggagtaccagctcccgtacgtcctcggctcggcgcatcaaggatgcctcccgccgcttccagcggacgtcttcatggtcccacagtatggatacctcaccctgaacaacgggagtcaggcggtaggacgctcttccttttactgcctggagtactttccttctcagatgctgcgtaccggaaacaactttaccttcagctacacctttgaggacgtgcctttccacagcagctacgctcacagccagagtttggaccggctgatgaatcctctgatcgaccagtatctgtattatctgaacaggacacaatcaaatagtggaactcttcagcagtctaggctactgtttagccaagctggacccaccagcatgtctcttcaagctaaaaactggctgcctggaccttgctacagacagcagcgtctgtcaaagcaggcaaacgacaacaacaacagcaactttccctggactgcggctacaaagtatcatctaaatggtcgggactcgttggttaatccaggaccagctatggccagccacaaagacgatgaagaaaagtttttccccatgcatggaaccctgatatttggtaaacaaggaacaaatgctaacgacgcggatttggaacatgtcatgattacagatgaagaagaaatcaggaccaccaatcccgtggctacagagcagtacggaaacgtgtcaaataatttgcaaaactcaaatactggtccaactacagaaaatgtcaatcaccagggagcgttacctggtatggtgtggcaggatcgagacgtgtacctgcagggacccatttgggccaagattcctcacaccgacggacactttcacccttctccactgatgggaggttttggactcaaacacccgcctcctcaaatcatgatcaaaaacactcctgttccagccaatcctcctacaaacttcagcgcggcaaagtttgcttccttcatcacacagtattccacgggacaggtcagcgtggagatcgagtgggagctgcagaaggagaacagcaaacgctggaaccccgagatccagtacacttccaactacaacaaatctgttaatgtggactttactgtggacactaatggtgtgtattcagagcctcgccccattggcaccagatacctgactcgtaatctgtaa

SEQ ID NO: 13024 - DNA, 2208 bp, Artificial Sequence
  source: /note="Description of Artificial Sequence: Synthetic polynucleotide"
atggctgccgatggttatcttccagattggctcgaggacactctctctgaaggaataagacagtggtggaagctcaaacctggcccaccaccaccaaagcccgcagagcggcatcaggacgacagcaggggtcttgtgcttcctgggtacaagtacctcggacccttcaacggactcgacaaaggagagccggtcaacgaggcagacgctgcggccctcgagcacgacaaggcctacgaccggcagctcgacagcggagacaacccgtacctcaagtacaaccacgccgacgcggagtttcaggagcgtcttaaagaagatacgtcttttgggggcaacctcggacgagcagtcttccaggcgaaaaagagggttcttgaacctctgggcctggttgaggaacctgttaagacggctccgggaaaaaagaggccggtagagcactctcctgcggagccagactcctcctcgggaaccggaaaagcgggccagcagcctgcaagaaagagattgaatttcggtcagactggagacgcagactccgtacctgacccccagcctctcggacagccaccagcagcccccacaagtttgggatctactgcaatggctacaggcagtggcgcaccaatggcagacaataacgagggtgccgatggagtgggtaattcctcaggaaattggcattgcgattcccaatggctgggcgacagagtcatcaccaccagcacccgaacctgggccctgcccacctacaacaaccacctctacaagcaaatctccagccaatcaggagcatcgaacgacaaccactactttggctacagcaccccttgggggtattttgacttcaacagattccactgtcacttctccccacgtgactggcaaagactcatcaacaacaactggggattccgacccaagagactcaacttcaagctctttaacattcaagtcaaagaggtcacgcagaatgacggtacgacgacgattgccaataaccttaccagcacggttcaggtgtttactgactcggagtaccagctcccgtacgtcctcggctcggcgcatcaaggatgcctcccgccgtttccagcggacgtcttcatggtcccacagtatggatacctcaccctgaacaacgggagtcaggcggtaggacgctcttccttttactgcctggagtactttccttctcagatgctgcgtaccggaaacaactttaccttcagctacacctttgaggacgtgcctttccacagcagctacgctcacagccagagtttggaccggctgatgaatcctctgatcgaccagtatctgtattatctgaacaggacacaatcaaatagtggaactcttcagcagtctaggctactgtttagccaagctggacccaccagcatgtctcttcaagctaaaaactggctgcctggaccttgctacagacagcagcgtctgtcaaagcaggcaaacgacaacaacaacagcaactttccctggactgcggctacaaagtatcatctaaatggtcgggactcgttggttaatccaggaccagctatggccagccacaaagacgatgaagaaaagtttttccccatgcatggaaccctgatatttggtaaacaaggaacaaatgctaacgacgcggatttggaacatgtcatgattacagatgaagaagaaatcaggaccaccaatcccgtggctacagagcagtacggaaacgtgtcaaataatttgcaaaactcaaatactggtccaactacagaaaatgtcaatcaccagggagcgttacctggtatggtgtggcaggatcgagacgtgtacctgcagggacccatttgggccaagattcctcacaccgacggacactttcacccttctccactgatgggaggttttggactcaaacacccgcctcctcaaatcatgatcaaaaacactcctgttccagccaatcctcctacaaacttcagcgcggcaaagtttgcttccttcatcacacagtattccacgggacaggtcagcgtggagatcgagtgggagctgcagaaggagaacagcaaacgctggaaccccgagatccagtacacttccaactacaacaaatctgttaatgtggactttactgtggacactaatggtgtgtattcagagcctcgccccattggcaccagatacctgactcgtaatctgtaa

SEQ ID NO: 13025 - DNA, 2208 bp, Artificial Sequence
  source: /note="Description of Artificial Sequence: Synthetic polynucleotide"
atggctgccgatggttatcttccagattggctcgaggacactctctctgaaggaataagacagtggtggaagctcaaacctggcccaccaccaccaaagcccgcagagcggcatcaggacgacagcaggggtcttgtgcttcctgggtacaagtacctcggacccttcaacggactcgacaaaggagagccggtcaacgaggcagacgctgcggccctcgagcacgacaaggcctacgaccggcagctcgacagcggagacaacccgtacctcaagtacaaccacgccgacgcggagtttcaggagcgtcttaaagaagatacgtcttttgggggcaacctcggacgagcagtcttccaggcgaaaaagagggttcttgaacctctgggcctggttgaggaacctgttaagacggctccgggaaaaaagaggccggtagagcactctcctgcggagccagactcctcctcgggaaccggaaaagcgggccagcagcctgcaagaaagagattgaatttcggtcagactggagacgcagactccgtacctgacccccagcctctcggacagccaccagcagcccccacaagtttgggatctactacaatggctacaggcagtggcgcaccaatggcagacaataacgagggtgccgatggagtgggtaattcctcaggaaattggcattgcgattcccaatggctgggcgacagagtcatcaccaccagcacccgaacctgggccctgcccacctacaacaaccacctctacaagcaaatctccagccaatcaggagcatcgaacgacaaccactactttggctacagcaccccttgggggtattttgacttcaacagattccactgtcacttctccccacgtgactggcaaagactcatcaacaacaactggggattccgacccaagagactcaacttcaagctctttaacattcaagtcaaagaggtcacgcagaatgacggtacgacgacgattgccaataaccttaccagcacggttcaggtgtttactgactcggagtaccagctcccgtacgtcctcggctcggcgcatcaaggatgcctcccgccgtttccagcggacgtcttcatggtcccacagtatggatacctcaccctgaacaacgggagtcaggcggtaggacgctcttccttttactgcctggagtactttccttctcagatgctgcgtaccggaaacaactttaccttcagctacacctttgaggacgtgcctttccacagcagctacgctcacagccagagtttggaccggctgatgaatcctctgatcgaccagtatctgtattatctgaacaggacacaatcaaatagtggaactcttcagcagtctaggctactgtttagccaagctggacccaccagcatgtctcttcaagctaaaaactggctgcctggaccttgctacagacagcagcgtctgtcaaggcaggcaaacgacaacaacaacagcaactttccctggactgcggctacaaagtatcatctaaatggtcgggactcgttggttaatccaggaccagctatggccagccacaaagacgatgaagaaaagtttttccccatgcatggaaccctgatatttggtaaacaaggaacaaatgctaacgacgcggatttggaacatgtcatgattacagatgaagaagaaatcaggaccaccaatcccgtggctacagagcagtacggaaacgtgtcaaataatttgcaaaactcaaatactggtccaactacagaaaatgtcaatcaccagggagcgttacctggtatggtgtggcaggatcgagacgtgtacctgcagggacccatttgggccaagattcctcacaccgacggacactttcacccttctccactgatgggaggttttggactcaaacacccgcctcctcaaatcatgatcaaaaacactcctgttccagccaatcctcctacaaacttcagcgcggcaaagtttgcttccttcatcacacagtattccacgggacaggtcagcgtggagatcgagtgggagctgcagaaggagaacagcaaacgctggaaccccgagatccagtacacttccaactacaacaaatctgttaatgtggactttactgtggacactaatggtgtgtattcagagcctcgccccattggcaccagatacctgactcgtaatctgtaa

SEQ ID NO: 13026 - DNA, 2208 bp, Artificial Sequence
  source: /note="Description of Artificial Sequence: Synthetic polynucleotide"
atggctgccgatggttatcttccagattggctcgaggacactctctctgaaggaataagacagtggtggaagctcaaacctggcccaccaccaccaaagcccgcagagcggcatcaggacgacagcaggggtcttgtgcttcctgggtacaagtacctcggacccttcaacggactcgacaaaggagagccggtcaacgaggcagacgctgcggccctcgagcacgacaaggcctacgaccggcagctcggcagcggagacaacccgtacctcaagtacaaccacgccgacgcggagtttcaggagcgtcttaaagaagatacgtcttttgggggcaacctcggacgagcagtcttccaggcgaaaaagagggttcttgaacctctgggcctggttgaggaacctgttaagacggctccgggaaaaaagaggccggtagagcactctcctgcggagccagactcctcctcgggaaccggaaaagcgggccagcagcctgcaagaaagagattgaatttcggtcagactggagacgcagactccgtacctgacccccagcctctcggacagccaccagcagcccccacaagtttgggatctactacaatggctacaggcagtggcgcaccaatggcagacaataacgagggtgccgatggagtgggtaattcctcaggaaattggcattgcgattcccaatggctgggcgacagagtcatcaccaccagcacccgaacctgggccctgcccacctacaacaaccacctctacaagcaaatctccagccaatcaggagcatcgaacgacaaccactactttggctacagcaccccttgggggtattttgacttcaacagattccactgtcacttctccccacgtgactggcaaagactcatcaacaacaactggggattccgacccaagagactcaacttcaagctctttaacattcaagtcaaagaggtcacgcagaatgacggtacgacgacgattgccaataaccttaccagcacggttcaggtgtttactgactcggagtaccagctcccgtacgtcctcggctcggcgcatcaaggatgcctcccgccgtttccagcggacgtcttcatggtcccacagtatggatacctcaccctgaacaacgggagtcaggcggtaggacgctcttccttttactgcctggagtactttccttctcagatgctgcgtaccggaaacaactttaccttcagctacacctttgaggacgtgcctttccacagcagctacgctcacagccagagtttggaccggctgatgaatcctctgatcgaccagtatctgtattatctgaacaggacacaatcaaatagtggaactcttcagcagtctaggctactgtttagccaagctggacccaccagcatgtctcttcaagctaaaaactggctgcctggaccttgctacagacagcagcgtctgtcaaagcaggcaaacgacaacaacaacagcaactttccctggactgcggctacaaagtatcatctaaatggtcgggactcgttggttaatccaggaccagctatggccagccacaaagacgatgaagaaaagtttttccccatgcatggaaccctgatatttggtaaacaaggaacaaatgctaacgacgcggatttggaacatgtcatgattacagatgaagaagaaatcaggaccaccaatcccgtggctacagagcagtacggaaacgtgtcaaataatttgcaaaactcaaatactggtccaactacagaaaatgtcaatcaccagggagcgttacctggtatggtgtggcaggatcgagacgtgtacctgcagggacccatttgggccaagattcctcacaccgacggacactttcacccttctccactgatgggaggttttggactcaaacacccgcctcctcaaatcatgatcaaaaacactcctgttccagccaatcctcctacaaacttcagcgcggcaaagtttgcttccttcatcacacagtattccacgggacaggtcagcgtggagatcgagtgggagctgcagaaggagaacagcaaacgctggaaccccgagatccagtacacttccaactacaacaaatctgttaatgtggactttactgtggacactaatggtgtgtattcagagcctcgccccattggcaccagatacctgactcgtaatctgtaa

SEQ ID NO: 13027 - DNA, 2208 bp, Artificial Sequence
  source: /note="Description of Artificial Sequence: Synthetic polynucleotide"
atggctgccgatggttatcttccagattggctcgaggacactctctctgaaggaataagacagtggtggaagctcaaacctggcccaccaccaccaaagcccgcagagcggcatcaggacgacagcaggggtcttgtgcttcctgggtacaagtacctcggacccttcaacggactcgacaaaggagagccggtcaacgaggcagacgctgcggccctcgagcacgacaaggcctacgaccggcagctcgacagcggagacaacccgtacctcaagtacaaccacgccgacgcggagtttcaggagcgtcttaaagaagatacgtcttttgggggcaacctcggacgagcagtcttccaggcgaaaaagagggttcttgaacctctgggcctggttgaggaacctgttaagacggctccgggaaaaaagaggccggtagagcactctcctgcggagccagactcctcctcgggaaccggaaaagcgggccagcagcctgcaagaaagagattgaatttcggtcagactggagacgcagactccgtacctgacccccagcctctcggacagccaccagcagcccccacaagtttgggatctactacaatggctacaggcagtggcgcaccaatggcagacaataacgagggtgccgatggagtgggtaattcctcaggaaattggcattgcgattcccaatggctgggcgacagagtcatcaccaccagcacccgaacctgggccctgcccacctacaacaaccacctctacaagcaaatctccagccaatcaggagcatcgaacgacaaccactactttggctacagcaccccttgggggtattttgacttcaacagattccactgtcacttctccccacgtgactggcaaagactcatcaacaacaactggggattccgacccaagagactcaacttcaagctctttaacattcaagtcaaagaggtcacgcagaatgacggtacgacgacgattgccaataaccttaccagcacggttcaggtgtttactgactcggagtaccagctcccgtacgtcctcggctcggcgcatcaaggatgcctcccgccgtttccagcggacgtcttcatggtcccacagtatggatacctcaccctgaacaacgggagtcaggcggtaggacgctcttccttttactgcctggagtactttccttctcagatgctgcgtaccggaaacaactttaccttcagctacacctttgaggacgtgcctttccacagcagctacgctcacagccagagtttggaccggctgatgaatcctctgatcgaccagtatctgcattatctgaacaggacacaatcaaatagtggaactcttcagcagtctaggctactgtttagccaagctggacccaccagcatgtctcttcaagctaaaaactggctgcctggaccttgctacagacagcagcgtctgtcaaagcaggcaaacgacaacaacaacagcaactttccctggactgcggctacaaagtatcatctaaatggtcgggactcgttggttaatccaggaccagctatggccagccacaaagacgatgaagaaaagtttttccccatgcatggaaccctgatatttggtaaacaaggaacaaatgctaacgacgcggatttggaacatgtcatgattacagatgaagaagaaatcaggaccaccaatcccgtggctacagagcagtacggaaacgtgtcaaataatttgcaaaactcaaatactggtccaactacagaaaatgtcaatcaccagggagcgttacctggtatggtgtggcaggatcgagacgtgtacctgcagggacccatttgggccaagattcctcacaccgacggacactttcacccttctccactgatgggaggttttggactcaaacacccgcctcctcaaatcatgatcaaaaacactcctgttccagccaatcctcctacaaacttcagcgcggcaaagtttgcttccttcatcacacagtattccacgggacaggtcagcgtggagatcgagtgggagctgcagaaggagaacagcaaacgctggaaccccgagatccagtacacttccaactacaacaaatctgttaatgtggactttactgtggacactaatggtgtgtattcagagcctcgccccattggcaccagatacctgactcgtaatctgtaa

SEQ ID NO: 13028 - DNA, 2208 bp, Artificial Sequence
  source: /note="Description of Artificial Sequence: Synthetic polynucleotide"
atggctgccgatggttatcttccagattggctcgaggacactctctctgaaggaataagacagtggtggaagctcaaacctggcccaccaccaccaaagcccgcagagcggcatcaggacgacagcaggggtcttgtgcttcctgggtacaagtacctcggacccttcaacggactcgacaaaggagagccggtcaacgaggcagacgctgcggccctcgagcacgacaaggcctacgaccggcagctcgacagcggagacaacccgtacctcaagtacaaccacgccgacgcggagtttcaggagcgtcttaaagaagatacgtcttttgggggcaacctcggacgagcagtcttccaggcgaaaaagagggttcttgaacctctgggcctggttgaggaacctgttaagacggctccgggaaaaaagaggccggtagagcaccctcctgcggagccagactcctcctcgggaaccggaaaagcgggccagcagcctgcaagaaagagattgaatttcggtcagactggagacgcagactccgtacctgacccccagcctctcggacagccaccagcagcccccacaagtttgggatctactacaatggctacaggcagtggcgcaccaatggcagacaataacgagggtgccgatggagtgggtaattcctcaggaaattggcattgcgattcccaatggctgggcgacagagtcatcaccaccagcacccgaacctgggccctgcccacctacaacaaccacctctacaagcaaatctccagccaatcaggagcatcgaacgacaaccactactttggctacagcaccccttgggggtattttgacttcaacagattccactgtcacttctccccacgtgactggcaaagactcatcaacaacaactggggattccgacccaagagactcaacttcaagctctttaacattcaagtcaaagaggtcacgcagaatgacggtacgacgacgattgccaataaccttaccagcacggttcaggtgtttactgactcggagtaccagctcccgtacgtcctcggctcggcgcatcaaggatgcctcccgccgtttccagcggacgtcttcatggtcccacagtatggatacctcaccctgaacaacgggagtcaggcggtaggacgctcttccttttactgcctggagtactttccttctcagatgctgcgtaccggaaacaactttaccttcagctacacctttgaggacgtgcctttccacagcagctacgctcacagccagagtttggaccggctgatgaatcctctgatcgaccagtatctgtattatctgaacaggacacaatcaaatagtggaactcttcagcagtctaggctactgtttagccaagctggacccaccagcatgtctcttcaagctaaaaactggctgcctggaccttgctacagacagcagcgtctgtcaaagcaggcaaacgacaacaacaacagcaactttccctggactgcggctacaaagtatcatctaaatggtcgggactcgttggttaatccaggaccagctatggccagccacaaagacgatgaagaaaagtttttccccatgcatggaaccctgatatttggtaaacaaggaacaaatgctaacgacgcggatttggaacatgtcatgattacagatgaagaagaaatcaggaccaccaatcccgtggctacagagcagtacggaaacgtgtcaaataatttgcaaaactcaaatactggtccaactacagaaaatgtcaatcaccagggagcgttacctggtatggtgtggcaggatcgagacgtgtacctgcagggacccatttgggccaagattcctcacaccgacggacactttcacccttctccactgatgggaggttttggactcaaacacccgcctcctcaaatcatgatcaaaaacactcctgttccagccaatcctcctacaaacttcagcgcggcaaagtttgcttccttcatcacacagtattccacgggacaggtcagcgtggagatcgagtgggagctgcagaaggagaacagcaaacgctggaaccccgagatccagtacacttccaactacaacaaatctgttaatgtggactttactgtggacactaatggtgtgtattcagagcctcgccccattggcaccagatacctgactcgtaatctgtaa

SEQ ID NO: 13029 - DNA, 2208 bp, Artificial Sequence
  source: /note="Description of Artificial Sequence: Synthetic polynucleotide"
atggctgccgatggttatcttccagattggctcgaggacactctctctgaaggaataagacagtggtggaagctcaaacctggcccaccaccaccaaagcccgcagagcggcatcaggacgacagcaggggtcttgtgcttcctgggtacaagtacctcggacccttcaacggactcgacaaaggagagccggtcaacgaggcagacgctgcggccctcgagcacgacaaggcctacgaccggcagctcgacagcggagacaacccgtacctcaagtacaaccacgccgacgcggagtttcaggagcgtcttaaagaagatacgtcttttgggggcaacctcggacgagcagtcttccaggcgaaaaagagggttcttgaacctctgggcctggttgaggaacctgttaagacggctccgggaaaaaagaggccggtagagcactctcctgcggagccagactcctcctcgggaaccggaaaagcgggccagcagcctgcaagaaagagattgaatttcggtcagactggagacgcagactccgtacctgacccccagcctctcggacagccaccagcagcccccacaagtttgggatctactacaatggctacaggcagtggcgcaccaatggcagacaataacgagggtgccgatggagtgggtaattcctcaggaaattggcattgcgattcccaatggctgggcgacagagtcatcaccaccagcacccgaacctgggccctgcccacctacaacaaccacctctacaagcaaatctccagccaatcaggagcatcgaacgacaaccactactttggctacagcaccccttgggggtattttgacttcaacagattccactgtcacttctccccacgtgactggcaaagactcatcaacaacaactggggattccgacccaagagactcaacttcaagctctttaacattcaagtcaaagaggtcacgcagaatgacggtacgacgacgattgccaataaccttaccagcacggttcaggtgtttactgactcggagtaccagctcccgtacgtcctcggctcggcgcatcaaggatgcctcccgccgtttccagcggacgtcttcatggtcccacagtatggatacctcaccctgaacaacgggagtcaggcggtaggacgctcttccttttactgcctggagtactttccttctcagatgctgcgtaccggaaacaactttaccttcagctacacctttgaggacgtgcctttccacagcagctacgctcacagccagagtttggaccggctgatgaatcctctgatcgaccagtatctgtattatctgaacaggacacaatcaaatagtggaactcttcagcagtctaggctactgtttagccaagctggacccaccagcatgtctcttcaagctaaaaactggctgcctggaccttgctacagacagcagcgtctgtcaaagcaggcaaacgacaacaacaacagcaactttccctggactgcggctacaaagtatcatctaaatggtcgggactcgttggttaatccaggaccagctatggccagccacaaagacgatgaagaaaagtttttccccatgcatggaaccctgatatttggtaaacaaggaacaaatgctaacgacgcggatttggaacatgtcatgattacagatgaagaagaaatcaggaccaccaatcccgtggctacagagcagtacggaaacgtgtcaaataatttgcaaaactcaaatactggtccaactacagaaaatgtcaatcaccagggagcgttacctggtatggtgtggcaggatcgagacgtgtacctgcagggacccatttgggccaagattcctcacaccgacggacactttcacccttctccactgatgggaggttttggactcaaacacccgcctcctcaaatcatgatcaaaaacactcctgttccagccaatcctcctacaaacttcagcgcggcaaagtttgcttccttcatcacacagtattccacgggacaggtcagcgtggagatcgagtgggagctgcagaaggagaacagcaaacgctggaaccccgagatccagtacacttccaactacaacaaatctgttaatgtggactttactgcggacactaatggtgtgtattcagagcctcgccccattggcaccagatacctgactcgtaatctgtaa

SEQ ID NO: 13030 - DNA, 2208 bp, Artificial Sequence
  source: /note="Description of Artificial Sequence: Synthetic polynucleotide"
atggctgccgatggttatcttccagattggctcgaggacactctctctgaaggaataagacagtggtggaagctcaaacctggcccaccaccaccaaagcccgcagagcggcatcaggacgacagcaggggtcttgtgcttcctgggtacaagtacctcggacccttcaacggactcgacaaaggagagccggtcaacgaggcagacgctgcggccctcgagcacgacaaggcctacgaccggcagctcgacagcggagacaacccgtacctcaagtacaaccacgccgacgcggagtttcaggagcgtcttaaagaagatacgtcttttgggggcaacctcggacgagcagtcttccaggcgaaaaagagggttcttgaacctctgggcctggttgaggaacctgttaagacggctccgggaaaaaagaggccggtagagcactctcctgcggagccagactcctcctcgggaaccggaaaagcgggccagcagcctgcaagaaagagattgaatttcggtcagactggagacgcagactccgtacctgacccccagcctctcggacagccaccagcagcccccacaagtttgggatctactacaatggctacaggcagtggcgcaccaatggcagacaataacgagggtgccgatggagtgggtaattcctcaggaaattggcattgcgattcccaatggctgggcgacagagtcatcaccaccagcacccgaacctgggccctgcccacctacaacaaccacctctacaagcaaatctccagccaatcaggagcatcgaacgacaaccactactttggctacagcaccccttgggggtattttgacttcaacagattccactgtcacttctccccacgtgactggcaaagactcatcaacaacaactggggattccgacccaagagactcaacttcaagctctttaacattcaagtcaaagaggtcacgcagaatgacggtacgacgacgattgccaataaccttaccagcacggttcaggtgtttactgactcggagtaccagctcccgtacgtcctcggctcggcgcatcaaggatgcctcccgccgtttccagcggacgtcttcatggtcccacagtatggatacctcaccctgaacaacgggagtcaggcggtaggacgctcttccttttactgcctggagtactttccttctcagatgctgcgtaccggaaacaactttaccttcagctacacctttgaggacgtgcctttccacagcagctacgctcacagccagagtttggaccggctgatgaatcctctgatcgaccagtatctgtattatctgaacaggacacaatcaaatagtggaactcttcggcagtctaggctactgtttagccaagctggacccaccagcatgtctcttcaagctaaaaactggctgcctggaccttgctacagacagcagcgtctgtcaaagcaggcaaacgacaacaacaacagcaactttccctggactgcggctacaaagtatcatctaaatggtcgggactcgttggttaatccaggaccagctatggccagccacaaagacgatgaagaaaagtttttccccatgcatggaaccctgatatttggtaaacaaggaacaaatgctaacgacgcggatttggaacatgtcatgattacagatgaagaagaaatcaggaccaccaatcccgtggctacagagcagtacggaaacgtgtcaaataatttgcaaaactcaaatactggtccaactacagaaaatgtcaatcaccagggagcgttacctggtatggtgtggcaggatcgagacgtgtacctgcagggacccatttgggccaagattcctcacaccgacggacactttcacccttctccactgatgggaggttttggactcaaacacccgcctcctcaaatcatgatcaaaaacactcctgttccagccaatcctcctacaaacttcagcgcggcaaagtttgcttccttcatcacacagtattccacgggacaggtcagcgtggagatcgagtgggagctgcagaaggagaacagcaaacgctggaaccccgagatccagtacacttccaactacaacaaatctgttaatgtggactttactgtggacactaatggtgtgtattcagagcctcgccccattggcaccagatacctgactcgtaatctgtaa

SEQ ID NO: 13031 - DNA, 2208 bp, Artificial Sequence
  source: /note="Description of Artificial Sequence: Synthetic polynucleotide"
atggctgccgatggttatcttccagattggctcgaggacactctctctgaaggaataagacagtggtggaagctcaaacctggcccaccaccaccaaagcccgcagagcggcatcaggacgacagcaggggtcttgtgcttcctgggtacaagtacctcggacccttcaacggactcgacaaaggagagccggtcaacgaggcagacgctgcggccctcgagcacgacaaggcctacgaccggcagctcgacagcggagacaacccgtacctcaagtacaaccacgccgacgcggagtttcaggagcgtcttaaagaagatacgtcttttgggggcaacctcggacgagcagtcttccaggcgaaaaagagggttcttgaacctctgggcctggttgaggaacctgttaagacggctccgggaaaaaagaggccggtagagcactctcctgcggagccagactcctcctcgggaaccggaaaagcgggccagcagcctgcaagaaagagattgaatttcggtcagactggagacgcagactccgtacctgacccccagcctctcggacagccaccagcagcccccacaagtttgggatctactacaatggctacaggcagtggcgcaccaatggcagacaataacgagggtgccgatggagtgggtaattcctcaggaaattggcattgcgattcccaatggctgggcgacagagtcatcaccaccagcacccgaacctgggccctgcccacctacaacaaccacctctacaagcaaatctccagccaatcaggagcatcgaacgacaaccactactttggctacagcaccccttgggggtattttgacttcaacagattccactgtcacttctccccacgtgactggcaaagactcatcaacaacaactggggattccgacccaagagactcaacttcaagctctttaacattcaagtcaaagaggtcacgcagaatgacggtacgacgacgattgccaataaccttaccagcacggttcaggtgtttactgactcggagtaccagctcccgtacgtcctcggctcggcgcatcaaggatgcctcccgccgtttccagcggacgtcttcatggtcccacagtatggatacctcaccctgaacaacgggagtcaggcggtaggacgctcttccttttactgcctggagtactttccttctcagatgctgcgtaccggaaacaactttaccttcagctacacctttgaggacgtgcctttccacagcagctacgctcacagccagagtttggaccggctgatgaatcctctgatcgaccagtatctgtattatctgaacaggacacaatcaaatagtggaactcttcagcagtctaggctactgtttagccaagctggacccaccagcatgtctcttcaagctaaaaactggctgcctggaccttgctacagacagcagcgtctgtcaaagcaggcaaacgacaacaacaacagcaactttccctggactgcggctacaaagtatcatctaaatggtcgggactcgttggttaatccaggaccagctatggccagccacaaagacgatgaagaaaagtttttccccatgcatggaaccctgatatttggtaaacaaggaacaaatgctaacgacgcggatttggaacatgtcatgattacagatgaagaagaaatcaggaccaccaatcccgtggctacagagcagtacggaaacgtgtcaaataatttgcaaaactcaaatactggtccaactacagaaaatgtcaatcaccagggagcgttacctggtatggtgtggcaggatcgagacgtgtacctgcagggacccatttgggccaagattcctcacaccgacggacactttcacccttctccactgatgggaggttttggactcaaacacccgcctcctcaaatcatgatcaaaaacactcctgttccagccaatcctcctacaaacttcagcgcggcaaagtttgcttccttcatcacacagtattccacgggacgggtcagcgtggagatcgagtgggagctgcagaaggagaacagcaaacgctggaaccccgagatccagtacacttccaactacaacaaatctgttaatgtggactttactgtggacactaatggtgtgtattcagagcctcgccccattggcaccagatacctgactcgtaatctgtaa

SEQ ID NO: 13032 - DNA, 2208 bp, Artificial Sequence
  source: /note="Description of Artificial Sequence: Synthetic polynucleotide"
atggctgccgatggttatcttccagattggctcgaggacactctctctgaaggaataagacagtggtggaagctcaaacctggcccaccaccaccaaagcccgcagagcggcatcaggacgacagcaggggtcttgtgcttcctgggtacaagtacctcggacccttcaacggactcgacaaaggagagccggtcaacgaggcagacgctgcggccctcgagcacgacaaggcctacgaccggcagctcgacagcggagacaacccgtacctcaagtacaaccacgccgacgcggagtttcaggagcgtcttaaagaagatacgtcttttgggggcaacctcggacgagcagtcttccgggcgaaaaagagggttcttgaacctctgggcctggttgaggaacctgttaagacggctccgggaaaaaagaggccggtagagcactctcctgcggagccagactcctcctcgggaaccggaaaagcgggccagcagcctgcaagaaagagattgaatttcggtcagactggagacgcagactccgtacctgacccccagcctctcggacagccaccagcagcccccacaagtttgggatctactacaatggctacaggcagtggcgcaccaatggcagacaataacgagggtgccgatggagtgggtaattcctcaggaaattggcattgcgattcccaatggctgggcgacagagtcatcaccaccagcacccgaacctgggccctgcccacctacaacaaccacctctacaagcaaatctccagccaatcaggagcatcgaacgacaaccactactttggctacagcaccccttgggggtattttgacttcaacagattccactgtcacttctccccacgtgactggcaaagactcatcaacaacaactggggattccgacccaagagactcaacttcaagctctttaacattcaagtcaaagaggtcacgcagaatgacggtacgacgacgattgccaataaccttaccagcacggttcaggtgtttactgactcggagtaccagctcccgtacgtcctcggctcggcgcatcaaggatgcctcccgccgtttccagcggacgtcttcatggtcccacagtatggatacctcaccctgaacaacgggagtcaggcggtaggacgctcttccttttactgcctggagtactttccttctcagatgctgcgtaccggaaacaactttaccttcagctacacctttgaggacgtgcctttccacagcagctacgctcacagccagagtttggaccggctgatgaatcctctgatcgaccagtatctgtattatctgaacaggacacaatcaaatagtggaactcttcagcagtctaggctactgtttagccaagctggacccaccagcatgtctcttcaagctaaaaactggctgcctggaccttgctacagacagcagcgtctgtcaaagcaggcaaacgacaacaacaacagcaactttccctggactgcggctacaaagtatcatctaaatggtcgggactcgttggttaatccaggaccagctatggccagccacaaagacgatgaagaaaagtttttccccatgcatggaaccctgatatttggtaaacaaggaacaaatgctaacgacgcggatttggaacatgtcatgattacagatgaagaagaaatcaggaccaccaatcccgtggctacagagcagtacggaaacgtgtcaaataatttgcaaaactcaaatactggtccaactacagaaaatgtcaatcaccagggagcgttacctggtatggtgtggcaggatcgagacgtgtacctgcagggacccatttgggccaagattcctcacaccgacggacactttcacccttctccactgatgggaggttttggactcaaacacccgcctcctcaaatcatgatcaaaaacactcctgttccagccaatcctcctacaaacttcagcgcggcaaagtttgcttccttcatcacacagtattccacgggacaggtcagcgtggagatcgagtgggagctgcagaaggagaacagcaaacgctggaaccccgagatccagtacacttccaactacaacaaatctgttaatgtggactttactgtggacactaatggtgtgtattcagagcctcgccccattggcaccagatacctgactcgtaatctgtaa

SEQ ID NO: 13033 - DNA, 2208 bp, Artificial Sequence
  source: /note="Description of Artificial Sequence: Synthetic polynucleotide"
atggctgccgatggttatcttccagattggctcgaggacactctctctgaaggaataagacagtggtggaagcccaaacctggcccaccaccaccaaagcccgcagagcggcatcaggacgacagcaggggtcttgtgcttcctgggtacaagtacctcggacccttcaacggactcgacaaaggagagccggtcaacgaggcagacgctgcggccctcgagcacgacaaggcctacgaccggcagctcgacagcggagacaacccgtacctcaagtacaaccacgccgacgcggagtttcaggagcgtcttaaagaagatacgtcttttgggggcaacctcggacgagcagtcttccaggcgaaaaagagggttcttgaacctctgggcctggttgaggaacctgttaagacggctccgggaaaaaagaggccggtagagcactctcctgcggagccagactcctcctcgggaaccggaaaagcgggccagcagcctgcaagaaagagattgaatttcggtcagactggagacgcagactccgtacctgacccccagcctctcggacagccaccagcagcccccacaagtttgggatctactacaatggctacaggcagtggcgcaccaatggcagacaataacgagggtgccgatggagtgggtaattcctcaggaaattggcattgcgattcccaatggctgggcgacagagtcatcaccaccagcacccgaacctgggccctgcccacctacaacaaccacctctacaagcaaatctccagccaatcaggagcatcgaacgacaaccactactttggctacagcaccccttgggggtattttgacttcaacagattccactgtcacttctccccacgtgactggcaaagactcatcaacaacaactggggattccgacccaagagactcaacttcaagctctttaacattcaagtcaaagaggtcacgcagaatgacggtacgacgacgattgccaataaccttaccagcacggttcaggtgtttactgactcggagtaccagctcccgtacgtcctcggctcggcgcatcaaggatgcctcccgccgtttccagcggacgtcttcatggtcccacagtatggatacctcaccctgaacaacgggagtcaggcggtaggacgctcttccttttactgcctggagtactttccttctcagatgctgcgtaccggaaacaactttaccttcagctacacctttgaggacgtgcctttccacagcagctacgctcacagccagagtttggaccggctgatgaatcctctgatcgaccagtatctgtattatctgaacaggacacaatcaaatagtggaactcttcagcagtctaggctactgtttagccaagctggacccaccagcatgtctcttcaagctaaaaactggctgcctggaccttgctacagacagcagcgtctgtcaaagcaggcaaacgacaacaacaacagcaactttccctggactgcggctacaaagtatcatctaaatggtcgggactcgttggttaatccaggaccagctatggccagccacaaagacgatgaagaaaagtttttccccatgcatggaaccctgatatttggtaaacaaggaacaaatgctaacgacgcggatttggaacatgtcatgattacagatgaagaagaaatcaggaccaccaatcccgtggctacagagcagtacggaaacgtgtcaaataatttgcaaaactcaaatactggtccaactacagaaaatgtcaatcaccagggagcgttacctggtatggtgtggcaggatcgagacgtgtacctgcagggacccatttgggccaagattcctcacaccgacggacactttcacccttctccactgatgggaggttttggactcaaacacccgcctcctcaaatcatgatcaaaaacactcctgttccagccaatcctcctacaaacttcagcgcggcaaagtttgcttccttcatcacacagtattccacgggacaggtcagcgtggagatcgagtgggagctgcagaaggagaacagcaaacgctggaaccccgagatccagtacacttccaactacaacaaatctgttaatgtggactttactgtggacactaatggtgtgtattcagagcctcgccccattggcaccagatacctgactcgtaatctgtaa

SEQ ID NO: 13034 - DNA, 2208 bp, Artificial Sequence
  source: /note="Description of Artificial Sequence: Synthetic polynucleotide"
atggctgccgatggttatcttccagattggctcgaggacactctctctgaaggaataagacagtggtggaagctcaaacctggcccaccaccaccaaagcccgcagagcggcatcaggacgacagcaggggtcttgtgcttcctgggtacaagtacctcggacccttcaacggactcgacaaaggagagccggtcaacgaggcagacgctgcggccctcgagcacgacaaggcctacgaccggcagctcgacagcggagacaacccgtacctcaagtacaaccacgccgacgcggagtttcaggagcgtcttaaagaagatacgtcttttgggggcaacctcggacgagcagtcttccaggcgaaaaagagggttcttgaacctctgggcctggttgaggaacctgttaagacggctccgggaaaaaagaggccggtagagcactctcctgcggagccagactcctcctcgggaaccggaaaagcgggccagcagcctgcaagaaagagattgaatttcggtcagactggagacgcagactccgtacctgacccccagcctctcggacagccaccagcagcccccacaagtttgggatctactacaatggctacaggcagtggcgcaccaatggcagacaataacgagggtgccgatggagtgggtaattcctcaggaaattggcattgcgattcccaatggctgggcgacagagtcatcaccaccagcacccgaacctgggccctgcccacctacaacaaccacctctacaagcaaatctccagccaatcaggagcatcgaacgacaaccactactttggctacagcaccccttgggggtattttgacttcaacagattccactgtcacttctccccacgtgactggcaaagactcatcaacaacaactggggattccgacccaagagactcaacttcaagctctttaacattcaagtcaaagaggtcacgcagaatgacggtacgacgacgattgccaataaccttaccagcacggttcaggtgtttactgactcggagtaccagctcccgtacgtcctcggctcggcgcatcaaggatgcctcccgccgtttccagcggacgtcttcatggtcccacagtatggatacctcaccctgaacaacgggagtcaggcggtaggacgctcttccttttactgcctggagtactttccttctcagatgctgcgtaccggaaacaactttaccttcagctacacctttgaggacgtgcctttccacagcagctacgctcacagccagagtttggaccggctgatgaatcctctgatcgaccagtatctgtattatctgaacaggacacaatcaaatagtggaactcttcagcagtctaggctactgtttagccaagctggacccaccagcatgtctcttcaagctaaaaactggctgcctggaccttgctacagacagcagcgtctgtcaaagcaggcaaacgacaacaacaacagcaactttccctggactgcggctacaaagtatcatctaaatggtcgggactcgttggttaatccaggaccagctatggccagccacaaagacgatgaagaaaagtttttccccatgcatggaaccctgatatttggtaaacaaggaacaaatgctaacgacgcggatttggaacatgtcatgattacagatgaagaagaaatcaggaccaccaatcccgtggctacagagcagtacggaaacgtgtcaaataatttgcaaaactcaaatactggtccaactacagaaaatgccaatcaccagggagcgttacctggtatggtgtggcaggatcgagacgtgtacctgcagggacccatttgggccaagattcctcacaccgacggacactttcacccttctccactgatgggaggttttggactcaaacacccgcctcctcaaatcatgatcaaaaacactcctgttccagccaatcctcctacaaacttcagcgcggcaaagtttgcttccttcatcacacagtattccacgggacaggtcagcgtggagatcgagtgggagctgcagaaggagaacagcaaacgctggaaccccgagatccagtacacttccaactacaacaaatctgttaatgtggactttactgtggacactaatggtgtgtattcagagcctcgccccattggcaccagatacctgactcgtaatctgtaa

SEQ ID NO: 13035 - DNA, 2208 bp, Artificial Sequence
  source: /note="Description of Artificial Sequence: Synthetic polynucleotide"
atggctgccgatggttatcttccagattggctcgaggacactccctctgaaggaataagacagtggtggaagctcaaacctggcccaccaccaccaaagcccgcagagcggcatcaggacgacagcaggggtcttgtgcttcctgggtacaagtacctcggacccttcaacggactcgacaaaggagagccggtcaacgaggcagacgctgcggccctcgagcacgacaaggcctacgaccggcagctcgacagcggagacaacccgtacctcaagtacaaccacgccgacgcggagtttcaggagcgtcttaaagaagatacgtcttttgggggcaacctcggacgagcagtcttccaggcgaaaaagagggttcttgaacctctgggcctggttgaggaacctgttaagacggctccgggaaaaaagaggccggtagagcactctcctgcggagccagactcctcctcgggaaccggaaaagcgggccagcagcctgcaagaaagagattgaatttcggtcagactggagacgcagactccgtacctgacccccagcctctcggacagccaccagcagcccccacaagtttgggatctactacaatggctacaggcagtggcgcaccaatggcagacaataacgagggtgccgatggagtgggtaattcctcaggaaattggcattgcgattcccaatggctgggcgacagagtcatcaccaccagcacccgaacctgggccctgcccacctacaacaaccacctctacaagcaaatctccagccaatcaggagcatcgaacgacaaccactactttggctacagcaccccttgggggtattttgacttcaacagattccactgtcacttctccccacgtgactggcaaagactcatcaacaacaactggggattccgacccaagagactcaacttcaagctctttaacattcaagtcaaagaggtcacgcagaatgacggtacgacgacgattgccaataaccttaccagcacggttcaggtgtttactgactcggagtaccagctcccgtacgtcctcggctcggcgcatcaaggatgcctcccgccgtttccagcggacgtcttcatggtcccacagtatggatacctcaccctgaacaacgggagtcaggcggtaggacgctcttccttttactgcctggagtactttccttctcagatgctgcgtaccggaaacaactttaccttcagctacacctttgaggacgtgcctttccacagcagctacgctcacagccagagtttggaccggctgatgaatcctctgatcgaccagtatctgtattatctgaacaggacacaatcaaatagtggaactcttcagcagtctaggctactgtttagccaagctggacccaccagcatgtctcttcaagctaaaaactggctgcctggaccttgctacagacagcagcgtctgtcaaagcaggcaaacgacaacaacaacagcaactttccctggactgcggctacaaagtatcatctaaatggtcgggactcgttggttaatccaggaccagctatggccagccacaaagacgatgaagaaaagtttttccccatgcatggaaccctgatatttggtaaacaaggaacaaatgctaacgacgcggatttggaacatgtcatgattacagatgaagaagaaatcaggaccaccaatcccgtggctacagagcagtacggaaacgtgtcaaataatttgcaaaactcaaatactggtccaactacagaaaatgtcaatcaccagggagcgttacctggtatggtgtggcaggatcgagacgtgtacctgcagggacccatttgggccaagattcctcacaccgacggacactttcacccttctccactgatgggaggttttggactcaaacacccgcctcctcaaatcatgatcaaaaacactcctgttccagccaatcctcctacaaacttcagcgcggcaaagtttgcttccttcatcacacagtattccacgggacaggtcagcgtggagatcgagtgggagctgcagaaggagaacagcaaacgctggaaccccgagatccagtacacttccaactacaacaaatctgttaatgtggactttactgtggacactaatggtgtgtattcagagcctcgccccattggcaccagatacctgactcgtaatctgtaa

SEQ ID NO: 13036 - DNA, 2208 bp, Artificial Sequence
  source: /note="Description of Artificial Sequence: Synthetic polynucleotide"
atggctgccgatggttatcttccagattggctcgaggacactctctctgaaggaataagacagtggtggaagctcaaacctggcccaccaccaccaaagcccgcagagcggcatcaggacgacagcaggggtcttgtgcttcctgggtacaagtacctcggacccttcaacggactcgacaaaggagagccggtcaacgaggcagacgctgcggccctcgagcacgacaaggcctacgaccggcagctcgacagcggagacaacccgtacctcaagtacaaccacgccgacgcggagtttcaggagcgtcttaaagaagatacgtcttttgggggcaacctcggacgagcagtcttccaggcgaaaaagagggttcttgaacctctgggcctggttgaggaacctgttaagacggctccgggaaaaaagaggccggtagagcactctcctgcggagccagactcctcctcgggaaccggaaaagcgggccagcagcctgcaagaaagagattgaatttcggtcagactggagacgcagactccgtacctgacccccagcctctcggacagccaccagcagcccccacaagtttgggatctactacaatggctacaggcagtggcgcaccaatggcagacaataacgagggtgccgatggagtgggtaattcctcaggaaattggcattgcgattcccaatggctgggcgacagagtcatcaccaccagcacccgaacctgggccctgcccacctacaacaaccacctctacaagcaaatctccagccaatcaggagcatcgaacgacaaccactactttggctacagcaccccttgggggtattttgacttcaacagattccactgtcacttctccccacgtgactggcaaagactcatcaacaacaactggggattccgacccaagagactcaacttcaggctctttaacattcaagtcaaagaggtcacgcagaatgacggtacgacgacgattgccaataaccttaccagcacggttcaggtgtttactgactcggagtaccagctcccgtacgtcctcggctcggcgcatcaaggatgcctcccgccgtttccagcggacgtcttcatggtcccacagtatggatacctcaccctgaacaacgggagtcaggcggtaggacgctcttccttttactgcctggagtactttccttctcagatgctgcgtaccggaaacaactttaccttcagctacacctttgaggacgtgcctttccacagcagctacgctcacagccagagtttggaccggctgatgaatcctctgatcgaccagtatctgtattatctgaacaggacacaatcaaatagtggaactcttcagcagtctaggctactgtttagccaagctggacccaccagcatgtctcttcaagctaaaaactggctgcctggaccttgctacagacagcagcgtctgtcaaagcaggcaaacgacaacaacaacagcaactttccctggactgcggctacaaagtatcatctaaatggtcgggactcgttggttaatccaggaccagctatggccagccacaaagacgatgaagaaaagtttttccccatgcatggaaccctgatatttggtaaacaaggaacaaatgctaacgacgcggatttggaacatgtcatgattacagatgaagaagaaatcaggaccaccaatcccgtggctacagagcagtacggaaacgtgtcaaataatttgcaaaactcaaatactggtccaactacagaaaatgtcaatcaccagggagcgttacctggtatggtgtggcaggatcgagacgtgtacctgcagggacccatttgggccaagattcctcacaccgacggacactttcacccttctccactgatgggaggttttggactcaaacacccgcctcctcaaatcatgatcaaaaacactcctgttccagccaatcctcctacaaacttcagcgcggcaaagtttgcttccttcatcacacagtattccacgggacaggtcagcgtggagatcgagtgggagctgcagaaggagaacagcaaacgctggaaccccgagatccagtacacttccaactacaacaaatctgttaatgtggactttactgtggacactaatggtgtgtattcagagcctcgccccattggcaccagatacctgactcgtaatctgtaa

SEQ ID NO: 13037 - DNA, 2208 bp, Artificial Sequence
  source: /note="Description of Artificial Sequence: Synthetic polynucleotide"
atggctgccgatggttatcttccagattggctcgaggacactctctctgaaggaataagacagtggtggaagctcaaacctggcccaccaccaccaaagcccgcagagcggcatcaggacgacagcaggggtcttgtgcttcctgggtacaagtacctcggacccttcaacggactcgacaaaggagagccggtcaacgaggcagacgctgcggccctcgagcacgacaaggcctacgaccggcagctcgacagcggagacaacccgtacctcaagtacaaccacgccgacgcggagtttcaggagcgtcttaaagaagatacgtcttttgggggcaacctcggacgagcagtcttccaggcgaaaaagagggttcttgaacctctgggcctggttgaggaacctgttaagacggctccgggaaaaaagaggccggtagagcactctcctgcggagccagactcctcctcgggaaccggaaaagcgggccagcagcctgcaagaaagagattgaatttcggtcaggctggagacgcagactccgtacctgacccccagcctctcggacagccaccagcagcccccacaagtttgggatctactacaatggctacaggcagtggcgcaccaatggcagacaataacgagggtgccgatggagtgggtaattcctcaggaaattggcattgcgattcccaatggctgggcgacagagtcatcaccaccagcacccgaacctgggccctgcccacctacaacaaccacctctacaagcaaatctccagccaatcaggagcatcgaacgacaaccactactttggctacagcaccccttgggggtattttgacttcaacagattccactgtcacttctccccacgtgactggcaaagactcatcaacaacaactggggattccgacccaagagactcaacttcaagctctttaacattcaagtcaaagaggtcacgcagaatgacggtacgacgacgattgccaataaccttaccagcacggttcaggtgtttactgactcggagtaccagctcccgtacgtcctcggctcggcgcatcaaggatgcctcccgccgtttccagcggacgtcttcatggtcccacagtatggatacctcaccctgaacaacgggagtcaggcggtaggacgctcttccttttactgcctggagtactttccttctcagatgctgcgtaccggaaacaactttaccttcagctacacctttgaggacgtgcctttccacagcagctacgctcacagccagagtttggaccggctgatgaatcctctgatcgaccagtatctgtattatctgaacaggacacaatcaaatagtggaactcttcagcagtctaggctactgtttagccaagctggacccaccagcatgtctcttcaagctaaaaactggctgcctggaccttgctacagacagcagcgtctgtcaaagcaggcaaacgacaacaacaacagcaactttccctggactgcggctacaaagtatcatctaaatggtcgggactcgttggttaatccaggaccagctatggccagccacaaagacgatgaagaaaagtttttccccatgcatggaaccctgatatttggtaaacaaggaacaaatgctaacgacgcggatttggaacatgtcatgattacagatgaagaagaaatcaggaccaccaatcccgtggctacagagcagtacggaaacgtgtcaaataatttgcaaaactcaaatactggtccaactacagaaaatgtcaatcaccagggagcgttacctggtatggtgtggcaggatcgagacgtgtacctgcagggacccatttgggccaagattcctcacaccgacggacactttcacccttctccactgatgggaggttttggactcaaacacccgcctcctcaaatcatgatcaaaaacactcctgttccagccaatcctcctacaaacttcagcgcggcaaagtttgcttccttcatcacacagtattccacgggacaggtcagcgtggagatcgagtgggagctgcagaaggagaacagcaaacgctggaaccccgagatccagtacacttccaactacaacaaatctgttaatgtggactttactgtggacactaatggtgtgtattcagagcctcgccccattggcaccagatacctgactcgtaatctgtaa

SEQ ID NO: 13038 - DNA, 2208 bp, Artificial Sequence
  source: /note="Description of Artificial Sequence: Synthetic polynucleotide"
atggctgccgatggttatcttccagattggctcgaggacactctctctgaaggaataagacagtggtggaagctcaaacctggcccaccaccaccaaagcccgcagagcggcatcaggacgacagcaggggtcttgtgcttcctgggtacaagtacctcggacccttcaacggactcgacaaaggagagccggtcaacgaggcagacgctgcggccctcgagcacgacaaggcctacgaccggcagctcgacagcggagacaacccgtacctcaagtacaaccacgccgacgcggagtttcaggagcgtcttaaagaagatacgtcttttgggggcaacctcggacgagcagtcttccaggcgaaaaagagggttcttgaacctctgggcctggttgaggaacctgttaagacggctccgggaaaaaagaggccggtagagcactctcctgcggagccagactcctcctcgggaaccggaaaagcgggccagcagcctgcaagaaagagattgaatttcggtcagactggagacgcagactccgtacctgacccccagcctctcggacagccaccagcagcccccacaagtttgggatctactacagtggctacaggcagtggcgcaccaatggcagacaataacgagggtgccgatggagtgggtaattcctcaggaaattggcattgcgattcccaatggctgggcgacagagtcatcaccaccagcacccgaacctgggccctgcccacctacaacaaccacctctacaagcaaatctccagccaatcaggagcatcgaacgacaaccactactttggctacagcaccccttgggggtattttgacttcaacagattccactgtcacttctccccacgtgactggcaaagactcatcaacaacaactggggattccgacccaagagactcaacttcaagctctttaacattcaagtcaaagaggtcacgcagaatgacggtacgacgacgattgccaataaccttaccagcacggttcaggtgtttactgactcggagtaccagctcccgtacgtcctcggctcggcgcatcaaggatgcctcccgccgtttccagcggacgtcttcatggtcccacagtatggatacctcaccctgaacaacgggagtcaggcggtaggacgctcttccttttactgcctggagtactttccttctcagatgctgcgtaccggaaacaactttaccttcagctacacctttgaggacgtgcctttccacagcagctacgctcacagccagagtttggaccggctgatgaatcctctgatcgaccagtatctgtattatctgaacaggacacaatcaaatagtggaactcttcagcagtctaggctactgtttagccaagctggacccaccagcatgtctcttcaagctaaaaactggctgcctggaccttgctacagacagcagcgtctgtcaaagcaggcaaacgacaacaacaacagcaactttccctggactgcggctacaaagtatcatctaaatggtcgggactcgttggttaatccaggaccagctatggccagccacaaagacgatgaagaaaagtttttccccatgcatggaaccctgatatttggtaaacaaggaacaaatgctaacgacgcggatttggaacatgtcatgattacagatgaagaagaaatcaggaccaccaatcccgtggctacagagcagtacggaaacgtgtcaaataatttgcaaaactcaaatactggtccaactacagaaaatgtcaatcaccagggagcgttacctggtatggtgtggcaggatcgagacgtgtacctgcagggacccatttgggccaagattcctcacaccgacggacactttcacccttctccactgatgggaggttttggactcaaacacccgcctcctcaaatcatgatcaaaaacactcctgttccagccaatcctcctacaaacttcagcgcggcaaagtttgcttccttcatcacacagtattccacgggacaggtcagcgtggagatcgagtgggagctgcagaaggagaacagcaaacgctggaaccccgagatccagtacacttccaactacaacaaatctgttaatgtggactttactgtggacactaatggtgtgtattcagagcctcgccccattggcaccagatacctgactcgtaatctgtaa

SEQ ID NO: 13039 - DNA, 2208 bp, Artificial Sequence
  source: /note="Description of Artificial Sequence: Synthetic polynucleotide"
atggctgccgatggttatcttccagattggctcgaggacactctctctgaaggaataagacagtggtggaagctcaaacctggcccaccaccaccaaagcccgcagagcggcatcaggacgacagcaggggtcttgtgcttcctgggtacaagtacctcggacccttcaacggactcgacaaaggagagccggtcaacgaggcagacgctgcggccctcgagcacgacaaggcctacgaccggcagctcgacagcggagacaacccgtacctcaagtacaaccacgccgacgcggagtttcaggagcgtcttaaagaagatacgtcttttgggggcaacctcggacgagcagtcttccaggcgaaaaagagggttcttgaacctctgggcctggttgaggaacctgttaagacggctccgggaaaaaagaggccggtagagcactctcctgcggagccagactcctcctcgggaaccggaaaagcgggccagcagcctgcaagaaagagattgaatttcggtcagactggagacgcagactccgtacctgacccccagcctctcggacagccaccagcagcccccacaagtttgggatctactacaatggctacaggcagtggcgcaccaatggcagacaataacgagggtgccgatggagtgggtaattcctcaggaaattggcattgcgattcccaatggctgggcgacagagtcatcaccaccagcacccgaacctgggccctgcccacctacaacaaccacctctacaagcaaatctccagccaatcaggagcatcgaacgacaaccactactttggctacagcaccccttgggggtattttgacttcaacagattccactgtcacttctccccacgtgactggcaaagactcatcaacaacaactggggattccgacccaagagactcaacttcaagctctttaacattcaagtcaaagaggtcacgcagaatgacggtacgacgacgattgccaataaccttaccagcacggttcaggtgtttactgactcggagtaccagctcccgtacgtcctcggctcggcgcatcaaggatgcctcccgccgtttccagcggacgtcttcatggtcccacagtatggatacctcaccctgaacaacgggagtcaggcggtaggacgctcttccttttactgcctggagtactttccttctcagatgctgcgtaccggaaacaactttaccttcagctacacctttgaggacgtgcctttccacagcagctacgctcacagccagagtttggaccggctgatgaatcctctgatcgaccagtatctgtattatctgaacaggacacaatcaaatagtggaactcttcagcagtctaggctactgtttagccaagctggacccaccagcatgtctcttcaagctaaaaactggctgcctggaccttgctacagacagcagcgtctgtcaaagcaggcaaacgacaacaacaacagcaactttccctggactgcggctacaaagtatcatctaaatggtcgggactcgttggttaatccaggaccagctatggccagccacaaaggcgatgaagaaaagtttttccccatgcatggaaccctgatatttggtaaacaaggaacaaatgctaacgacgcggatttggaacatgtcatgattacagatgaagaagaaatcaggaccaccaatcccgtggctacagagcagtacggaaacgtgtcaaataatttgcaaaactcaaatactggtccaactacagaaaatgtcaatcaccagggagcgttacctggtatggtgtggcaggatcgagacgtgtacctgcagggacccatttgggccaagattcctcacaccgacggacactttcacccttctccactgatgggaggttttggactcaaacacccgcctcctcaaatcatgatcaaaaacactcctgttccagccaatcctcctacaaacttcagcgcggcaaagtttgcttccttcatcacacagtattccacgggacaggtcagcgtggagatcgagtgggagctgcagaaggagaacagcaaacgctggaaccccgagatccagtacacttccaactacaacaaatctgttaatgtggactttactgtggacactaatggtgtgtattcagagcctcgccccattggcaccagatacctgactcgtaatctgtaa

SEQ ID NO: 13040 - DNA, 2208 bp, Artificial Sequence
  source: /note="Description of Artificial Sequence: Synthetic polynucleotide"
atggctgccgatggttatcttccagattggctcgaggacactctctctgaaggaataagacagtggtggaagctcaaacctggcccaccaccaccaaagcccgcagagcggcatcaggacgacagcaggggtcttgtgcttcctgggtacaagtacctcggacccttcaacggactcgacaaaggagagccggtcaacgaggcagacgctgcggccctcgagcacgacaaggcctacgaccggcagctcgacagcggagacaacccgtacctcaagtacaaccacgccgacgcggagtttcaggagcgtcttaaagaagatacgtcttttgggggcaacctcggacgagcagtcttccaggcgaaaaagagggttcttgaacctctgggcctggttgaggaacctgttaagacggctccgggaaaaaagaggccggtagagcactctcctgcggagccagactcctcctcgggaaccggaaaagcgggccagcagcctgcaagaaagggattgaatttcggtcagactggagacgcagactccgtacctgacccccagcctctcggacagccaccagcagcccccacaagtttgggatctactacaatggctacaggcagtggcgcaccaatggcagacaataacgagggtgccgatggagtgggtaattcctcaggaaattggcattgcgattcccaatggctgggcgacagagtcatcaccaccagcacccgaacctgggccctgcccacctacaacaaccacctctacaagcaaatctccagccaatcaggagcatcgaacgacaaccactactttggctacagcaccccttgggggtattttgacttcaacagattccactgtcacttctccccacgtgactggcaaagactcatcaacaacaactggggattccgacccaagagactcaacttcaagctctttaacattcaagtcaaagaggtcacgcagaatgacggtacgacgacgattgccaataaccttaccagcacggttcaggtgtttactgactcggagtaccagctcccgtacgtcctcggctcggcgcatcaaggatgcctcccgccgtttccagcggacgtcttcatggtcccacagtatggatacctcaccctgaacaacgggagtcaggcggtaggacgctcttccttttactgcctggagtactttccttctcagatgctgcgtaccggaaacaactttaccttcagctacacctttgaggacgtgcctttccacagcagctacgctcacagccagagtttggaccggctgatgaatcctctgatcgaccagtatctgtattatctgaacaggacacaatcaaatagtggaactcttcagcagtctaggctactgtttagccaagctggacccaccagcatgtctcttcaagctaaaaactggctgcctggaccttgctacagacagcagcgtctgtcaaagcaggcaaacgacaacaacaacagcaactttccctggactgcggctacaaagtatcatctaaatggtcgggactcgttggttaatccaggaccagctatggccagccacaaagacgatgaagaaaagtttttccccatgcatggaaccctgatatttggtaaacaaggaacaaatgctaacgacgcggatttggaacatgtcatgattacagatgaagaagaaatcaggaccaccaatcccgtggctacagagcagtacggaaacgtgtcaaataatttgcaaaactcaaatactggtccaactacagaaaatgtcaatcaccagggagcgttacctggtatggtgtggcaggatcgagacgtgtacctgcagggacccatttgggccaagattcctcacaccgacggacactttcacccttctccactgatgggaggttttggactcaaacacccgcctcctcaaatcatgatcaaaaacactcctgttccagccaatcctcctacaaacttcagcgcggcaaagtttgcttccttcatcacacagtattccacgggacaggtcagcgtggagatcgagtgggagctgcagaaggagaacagcaaacgctggaaccccgagatccagtacacttccaactacaacaaatctgttaatgtggactttactgtggacactaatggtgtgtattcagagcctcgccccattggcaccagatacctgactcgtaatctgtaa

SEQ ID NO: 13041 - DNA, 2208 bp, Artificial Sequence
  source: /note="Description of Artificial Sequence: Synthetic polynucleotide"
atggctgccgatggttatcttccagattggctcgaggacactctctctgaaggaataagacagtggtggaagctcaaacctggcccaccaccaccaaagcccgcagagcggcatcaggacgacagcaggggtcttgtgcttcctgggtacaagtacctcggacccttcaacggactcgacaaaggagagccggtcaacgaggcagacgctgcggccctcgagcacgacaaggcctacgaccggcagctcgacagcggagacaacccgtacctcaagtacaaccacgccgacgcggagtttcaggagcgtcttaaagaagatacgtcttttgggggcaacctcggacgagcagtcttccaggcgaaaaagagggttcttgaacctctgggcctggttgaggaacctgttaagacggctccgggaaaaaagaggccggtagagcactctcctgcggagccagactcctcctcgggaaccggaaaagcgggccagcagcctgcaagaaagagattgaatttcggtcagactggagacgcagactccgtacctgacccccagcctctcggacagccaccagcagcccccacaagtttgggatctactacaatggctacaggcagtggcgcaccaatggcagacaataacgagggtgccgatggagtgggtaattcctcaggaaattggcattgcgattcccaatggctgggcgacagagtcatcaccaccagcacccgaacctgggccctgcccacctacaacaaccacctctacaagcaaatctccagccaatcaggagcatcgaacgacaaccactactttggctacagcaccccttgggggtattttgacttcaacagattccactgtcacttctccccacgtgactggcaaagactcatcaacaacaactggggattccgacccaagagactcaacttcaagctctttaacattcaagtcaaagaggtcacgcagaatgacggtacggcgacgattgccaataaccttaccagcacggttcaggtgtttactgactcggagtaccagctcccgtacgtcctcggctcggcgcatcaaggatgcctcccgccgtttccagcggacgtcttcatggtcccacagtatggatacctcaccctgaacaacgggagtcaggcggtaggacgctcttccttttactgcctggagtactttccttctcagatgctgcgtaccggaaacaactttaccttcagctacacctttgaggacgtgcctttccacagcagctacgctcacagccagagtttggaccggctgatgaatcctctgatcgaccagtatctgtattatctgaacaggacacaatcaaatagtggaactcttcagcagtctaggctactgtttagccaagctggacccaccagcatgtctcttcaagctaaaaactggctgcctggaccttgctacagacagcagcgtctgtcaaagcaggcaaacgacaacaacaacagcaactttccctggactgcggctacaaagtatcatctaaatggtcgggactcgttggttaatccaggaccagctatggccagccacaaagacgatgaagaaaagtttttccccatgcatggaaccctgatatttggtaaacaaggaacaaatgctaacgacgcggatttggaacatgtcatgattacagatgaagaagaaatcaggaccaccaatcccgtggctacagagcagtacggaaacgtgtcaaataatttgcaaaactcaaatactggtccaactacagaaaatgtcaatcaccagggagcgttacctggtatggtgtggcaggatcgagacgtgtacctgcagggacccatttgggccaagattcctcacaccgacggacactttcacccttctccactgatgggaggttttggactcaaacacccgcctcctcaaatcatgatcaaaaacactcctgttccagccaatcctcctacaaacttcagcgcggcaaagtttgcttccttcatcacacagtattccacgggacaggtcagcgtggagatcgagtgggagctgcagaaggagaacagcaaacgctggaaccccgagatccagtacacttccaactacaacaaatctgttaatgtggactttactgtggacactaatggtgtgtattcagagcctcgccccattggcaccagatacctgactcgtaatctgtaa

SEQ ID NO: 13042 - DNA, 2208 bp, Artificial Sequence
  source: /note="Description of Artificial Sequence: Synthetic polynucleotide"
atggctgccgatggttatcttccagattggctcgaggacactctctctgaaggaataagacagtggtggaagctcaaacctggcccaccaccaccaaagcccgcagagcggcatcaggacgacagcaggggtcttgtgcttcctgggtacaagtacctcggacccttcaacggactcgacaaaggagagccggtcaacgaggcagacgctgcggccctcgagcacgacaaggcctacgaccggcagctcgacagcggagacaacccgtacctcaagtacaaccacgccgacgcggagtttcaggagcgtcttaaagaagatacgtcttttgggggcaacctcggacgagcagtcttccaggcgaaaaagagggttcttgaacctctgggcctggttgaggaacctgttaagacggctccgggaaaaaagaggccggtagagcactctcctgcggagccagactcctcctcgggaaccggaaaagcgggccagcagcctgcaagaaggagattgaatttcggtcagactggagacgcagactccgtacctgacccccagcctctcggacagccaccagcagcccccacaagtttgggatctactacaatggctacaggcagtggcgcaccaatggcagacaataacgagggtgccgatggagtgggtaattcctcaggaaattggcattgcgattcccaatggctgggcgacagagtcatcaccaccagcacccgaacctgggccctgcccacctacaacaaccacctctacaagcaaatctccagccaatcaggagcatcgaacgacaaccactactttggctacagcaccccttgggggtattttgacttcaacagattccactgtcacttctccccacgtgactggcaaagactcatcaacaacaactggggattccgacccaagagactcaacttcaagctctttaacattcaagtcaaagaggtcacgcagaatgacggtacgacgacgattgccaataaccttaccagcacggttcaggtgtttactgactcggagtaccagctcccgtacgtcctcggctcggcgcatcaaggatgcctcccgccgtttccagcggacgtcttcatggtcccacagtatggatacctcaccctgaacaacgggagtcaggcggtaggacgctcttccttttactgcctggagtactttccttctcagatgctgcgtaccggaaacaactttaccttcagctacacctttgaggacgtgcctttccacagcagctacgctcacagccagagtttggaccggctgatgaatcctctgatcgaccagtatctgtattatctgaacaggacacaatcaaatagtggaactcttcagcagtctaggctactgtttagccaagctggacccaccagcatgtctcttcaagctaaaaactggctgcctggaccttgctacagacagcagcgtctgtcaaagcaggcaaacgacaacaacaacagcaactttccctggactgcggctacaaagtatcatctaaatggtcgggactcgttggttaatccaggaccagctatggccagccacaaagacgatgaagaaaagtttttccccatgcatggaaccctgatatttggtaaacaaggaacaaatgctaacgacgcggatttggaacatgtcatgattacagatgaagaagaaatcaggaccaccaatcccgtggctacagagcagtacggaaacgtgtcaaataatttgcaaaactcaaatactggtccaactacagaaaatgtcaatcaccagggagcgttacctggtatggtgtggcaggatcgagacgtgtacctgcagggacccatttgggccaagattcctcacaccgacggacactttcacccttctccactgatgggaggttttggactcaaacacccgcctcctcaaatcatgatcaaaaacactcctgttccagccaatcctcctacaaacttcagcgcggcaaagtttgcttccttcatcacacagtattccacgggacaggtcagcgtggagatcgagtgggagctgcagaaggagaacagcaaacgctggaaccccgagatccagtacacttccaactacaacaaatctgttaatgtggactttactgtggacactaatggtgtgtattcagagcctcgccccattggcaccagatacctgactcgtaatctgtaa

SEQ ID NO: 13043 - DNA, 2208 bp, Artificial Sequence
  source: /note="Description of Artificial Sequence: Synthetic polynucleotide"
atggctgccgatggttatcttccagattggctcgaggacactctctctgaaggaataagacagtggtggaagctcaaacctggcccaccaccaccaaagcccgcagagcggcatcaggacgacagcaggggtcttgtgcttcctgggtacaagtacctcggacccttcaacggactcgacaaaggagagccggtcaacgaggcagacgctgcggccctcgagcacgacaaggcctacgaccggcagctcgacagcggagacaacccgtacctcaagtacaaccacgccgacgcggagtttcaggagcgtcttaaagaagatacgtcttttgggggcaacctcggacgagcagtcttccaggcgaaaaagagggttcttgaacctctgggcctggttgaggaacctgttaagacggctccgggaaaaaagaggccggtagagcactctcctgcggagccagactcctcctcgggaaccggaaaagcgggccagcagcctgcaagaaagagattgaatttcggtcagactggagacgcagactccgtacctgacccccagcctctcggacagccaccagcagcccccacaagtttgggatctactacaatggctacaggcagtggcgcaccaatggcagacaataacgagggtgccgatggagtgggtaattcctcaggaaattggcattgcgattcccaatggctgggcgacagagtcatcaccaccagcacccgaacctgggccctgcccacctacaacaaccacctctacaagcaaatctccagccaatcaggagcatcgaacgacaaccactactttggctacagcaccccttgggggtattttgacttcaacagattccactgtcacttctccccacgtgactggcaaagactcatcaacaacaactggggattccgacccaagagactcaacttcaagctctttaacattcaagtcaaagaggtcacgcagaatgacggtacgacgacgattgccaataaccttaccagcacggttcaggtgtttactgactcggagtaccagctcccgtacgtcctcggctcggcgcatcaaggatgcctcccgccgtttccagcggacgtcttcatggtcccacagtatggatacctcaccctgaacaacgggagtcaggcggtaggacgctcttccttttactgcctggagtactttccttctcagatgctgcgtaccggaaacaactttaccttcagctacacctttgaggacgtgcctttccacagcagctacgctcacagccagagtttggaccggctgatgaatcctctgatcgaccagtatctgtattatctgaacaggacacaatcaaatagtggaactcttcagcagtctaggctactgtttagccaagctggacccaccagcatgtctcttcaagctaaaaactggctgcctggaccttgctacagacagcagcgtctgtcaaagcaggcaaacgacaacaacaacagcaactttccctggactgcggctacaaagtatcatctaaatggtcgggactcgttggttaatccaggaccagctatggccagccacaaagacgatgaagaaaagtttttccccatgcatggaaccctgatatttggtaaacaaggaacaaatgctaacgacgcggatttggaacatgtcatgattacagatgaagaagaaatcaggaccaccaatcccgtggctacagagcagtacggaaacgtgtcaaataatttgcaaaactcaaatactggtccaactacagaaaatgtcaatcaccagggagcgttacctggtatggtgtggcaggatcgagacgtgtacctgcagggacccatttgggccaagattcctcacaccgacggacactttcacccttctccactgatgggaggttttggactcaaacacccgcctcctcaaatcatgatcaaaaacactcctgttccagccaatcctcctacaaacttcagcgcggcaaagtttgcttccctcatcacacagtattccacgggacaggtcagcgtggagatcgagtgggagctgcagaaggagaacagcaaacgctggaaccccgagatccagtacacttccaactacaacaaatctgttaatgtggactttactgtggacactaatggtgtgtattcagagcctcgccccattggcaccagatacctgactcgtaatctgtaa

SEQ ID NO: 13044 - DNA, 2208 bp, Artificial Sequence
  source: /note="Description of Artificial Sequence: Synthetic polynucleotide"
atggctgccgatggttatcttccagattggctcgaggacactctctctgaaggaataagacagtggtggaagctcaaacctggcccaccaccaccaaagcccgcagagcggcatcaggacgacagcaggggtcttgtgcttcctgggtacaagtacctcggacccttcaacggactcgacaaaggagagccggtcaacgaggcagacgctgcggccctcgagcacgacaaggcctacgaccggcagctcgacagcggagacaacccgtacctcaagtacaaccacgccgacgcggagtttcaggagcgtcttaaagaagatacgtcttttgggggcaacctcggacgagcagtcttccaggcgaaaaagagggttcttgaacctctgggcctggttgaggaacctgttaagacggctccgggaaaaaagaggccggtagagcactctcctgcggagccagactcctcctcgggaaccggaaaagcgggccagcagcctgcaagaaagagattgaatttcggtcagactggagacgcagactccgtacctgacccccagcctctcggacagccaccagcagcccccacaagtttgggatctactacaatggctacaggcagtggcgcaccaatggcagacaataacgagggtgccgatggagtgggtaattcctcaggaaattggcattgcgattcccaatggctgggcgacagagtcatcaccaccagcacccgaacctgggccctgcccacctacaacaaccacctctacaagcaaatctccagccaatcaggagcatcgaacgacaaccactactttggctacagcaccccttgggggtattttgacttcaacagattccactgtcacttctccccacgtgactggcaaagactcatcaacaacaactggggattccgacccaagagactcagcttcaagctctttaacattcaagtcaaagaggtcacgcagaatgacggtacgacgacgattgccaataaccttaccagcacggttcaggtgtttactgactcggagtaccagctcccgtacgtcctcggctcggcgcatcaaggatgcctcccgccgtttccagcggacgtcttcatggtcccacagtatggatacctcaccctgaacaacgggagtcaggcggtaggacgctcttccttttactgcctggagtactttccttctcagatgctgcgtaccggaaacaactttaccttcagctacacctttgaggacgtgcctttccacagcagctacgctcacagccagagtttggaccggctgatgaatcctctgatcgaccagtatctgtattatctgaacaggacacaatcaaatagtggaactcttcagcagtctaggctactgtttagccaagctggacccaccagcatgtctcttcaagctaaaaactggctgcctggaccttgctacagacagcagcgtctgtcaaagcaggcaaacgacaacaacaacagcaactttccctggactgcggctacaaagtatcatctaaatggtcgggactcgttggttaatccaggaccagctatggccagccacaaagacgatgaagaaaagtttttccccatgcatggaaccctgatatttggtaaacaaggaacaaatgctaacgacgcggatttggaacatgtcatgattacagatgaagaagaaatcaggaccaccaatcccgtggctacagagcagtacggaaacgtgtcaaataatttgcaaaactcaaatactggtccaactacagaaaatgtcaatcaccagggagcgttacctggtatggtgtggcaggatcgagacgtgtacctgcagggacccatttgggccaagattcctcacaccgacggacactttcacccttctccactgatgggaggttttggactcaaacacccgcctcctcaaatcatgatcaaaaacactcctgttccagccaatcctcctacaaacttcagcgcggcaaagtttgcttccttcatcacacagtattccacgggacaggtcagcgtggagatcgagtgggagctgcagaaggagaacagcaaacgctggaaccccgagatccagtacacttccaactacaacaaatctgttaatgtggactttactgtggacactaatggtgtgtattcagagcctcgccccattggcaccagatacctgactcgtaatctgtaa

SEQ ID NO: 13045 - DNA, 2208 bp, Artificial Sequence
  source: /note="Description of Artificial Sequence: Synthetic polynucleotide"
atggctgccgatggttatcttccagattggctcgaggacactctctctgaaggaataagacagtggtggaagctcaaacctggcccaccaccaccaaagcccgcagagcggcatcaggacgacagcaggggtcttgtgcttcctgggtacaagtacctcggacccttcaacggactcgacaaaggagagccggtcaacgaggcagacgctgcggccctcgagcacgacaaggcctacgaccggcagctcgacagcggagacaacccgtacctcaagtacaaccacgccgacgcggagtttcaggagcgtcttaaagaagatacgtcttttgggggcaacctcggacgagcagtcttccaggcgaaaaagagggttcttgaacctctgggcctggttgaggaacctgttaagacggctccgggaaaaaagaggccggtagagcactctcctgcggagccagactcctcctcgggaaccggaaaagcgggccagcagcctgcaagaaagagattgaatttcggtcagactggagacgcagactccgtacctgacccccagcctctcggacagccaccagcagcccccacaagtttgggatctactacaatggctacaggcagtggcgcaccaatggcagacaataacgagggtgccgatggagtgggtaattcctcaggaaattggcattgcgattcccaatggctgggcgacagagtcatcaccaccagcacccgaacctgggccctgcccacctacaacaaccacctctacaagcaaatctccagccaatcaggagcatcgaacgacaaccactactttggctacagcaccccttgggggtattttgacttcaacagattccactgtcacttctccccacgtgactggcaaagactcatcaacaacaactggggattccgacccaagagactcaacttcaagctctttaacattcaagtcaaagaggtcacgcagaatgacggtacgacgacgattgccaataaccttaccagcacggttcaggtgtttactgactcggagtaccagctcccgtacgtcctcggctcggcgcatcaaggatgcctcccgccgtttccagcggacgtcttcatggtcccacagtatggatacctcaccctgaacaacgggagtcaggcggtaggacgctcttccttttactgcctggagtactttccttctcagatgctgcgtaccggaaacaactttaccttcagctacacctttgaggacgtgcctttccacagcagctacgctcacagccagagtttggaccggctgatgaatcctctgatcgaccagtatctgtattatctgaacaggacacaatcaaatagtggaactcttcagcagtctaggctactgtttagccaagctggacccaccagcatgtctcttcaagctaaaaactggctgcctggaccttgctacagacagcagcgtctgtcaaagcaggcaaacgacaacaacaacagcaactttccctggactgcggctacaaagtatcatctaaatggtcgggactcgttggttaatccaggaccagctatggccagccacaaagacgatgaagaaaagtttttccccatgcatggaaccctgatatttggtaaacaaggaacaaatgctaacgacgcggatttggaacatgtcatgattacagatgaagaagaaatcaggaccaccaatcccgtggctacagggcagtacggaaacgtgtcaaataatttgcaaaactcaaatactggtccaactacagaaaatgtcaatcaccagggagcgttacctggtatggtgtggcaggatcgagacgtgtacctgcagggacccatttgggccaagattcctcacaccgacggacactttcacccttctccactgatgggaggttttggactcaaacacccgcctcctcaaatcatgatcaaaaacactcctgttccagccaatcctcctacaaacttcagcgcggcaaagtttgcttccttcatcacacagtattccacgggacaggtcagcgtggagatcgagtgggagctgcagaaggagaacagcaaacgctggaaccccgagatccagtacacttccaactacaacaaatctgttaatgtggactttactgtggacactaatggtgtgtattcagagcctcgccccattggcaccagatacctgactcgtaatctgtaa

SEQ ID NO: 13046 - DNA, 2208 bp, Artificial Sequence
  source: /note="Description of Artificial Sequence: Synthetic polynucleotide"
atggctgccgatggttatcttccagattggctcgaggacactctctctgaaggaataagacagtggtggaagctcaaacctggcccaccaccaccaaagcccgcagagcggcatcaggacgacagcaggggtcttgtgcttcctgggtacaagtacctcggacccttcaacggactcgacaaaggagagccggtcaacgaggcagacgctgcggccctcgagcacgacaaggcctacgaccggcagctcgacagcggagacaacccgtacctcaagtacaaccacgccgacgcggagtttcaggagcgtcttaaagaagatacgtcttttgggggcaacctcggacgagcagtcttccaggcgaaaaagagggttcttgaacctctgggcctggttgaggaacctgttaagacggctccgggaaaaaagaggccggtagagcactctcctgcggagccagactcctcctcgggaaccggaaaagcgggccagcagcctgcaagaaagagattgaatttcggtcagactggagacgcagactccgtacctgacccccagcctctcggacagccaccagcagcccccacaagtttgggatctactacaatggctacaggcagtggcgcaccaatggcagacaataacgagggtgccgatggagtgggtaattcctcaggaaattggcattgcgattcccaatggctgggcgacagagtcatcaccaccagcacccgaacctgggccctgcccacctacaacaaccacctctacaagcaaatctccagccaatcaggagcatcgaacgacaaccactactttggctacagcaccccttgggggtattttgacttcaacagattccactgtcacttctccccacgtgactggcaaagactcatcaacaacaactggggattccgacccaagagactcaacttcaagctctttaacattcaagtcaaagaggtcacgcagaatgacggtacgacgacgattgccaataaccttaccagcacggttcaggtgtttactgactcggagtaccagctcccgtacgtcctcggctcggcgcatcaaggatgcctcccgccgtttccagcggacgtcttcatggtcccacagtatggatacctcaccctgaacaacgggagtcaggcggtaggacgctcttccttttactgcctggagtactttccttctcagatgctgcgtaccggaaacaactttaccttcagctacacctttgaggacgtgcctttccacagcagctacgctcacagccagagtttggaccggctgatgaatcctctgatcgaccagtatctgtattatctgaacaggacacaatcaaatagtggaactcttcagcagtctaggctactgtttagccaagctggacccaccagcatgtctcttcaagctaaaaactggctgcctggaccttgctacagacagcagcgtctgtcaaagcaggcaaacgacaacaacaacagcaactttccctggactgcggctacaaagtatcatctaaatggtcgggactcgttggttaatccaggaccagctatggccagccacaaagacgatgaagaaaagtttttccccatgcatggaaccctgatatttggtaaacaaggaacaaatgctaacgacgcggatttggaacatgtcatgattacagatgaagaagaaatcaggaccaccaatcccgtggctacagagcagtacggaaacgtgccaaataatttgcaaaactcaaatactggtccaactacagaaaatgtcaatcaccagggagcgttacctggtatggtgtggcaggatcgagacgtgtacctgcagggacccatttgggccaagattcctcacaccgacggacactttcacccttctccactgatgggaggttttggactcaaacacccgcctcctcaaatcatgatcaaaaacactcctgttccagccaatcctcctacaaacttcagcgcggcaaagtttgcttccttcatcacacagtattccacgggacaggtcagcgtggagatcgagtgggagctgcagaaggagaacagcaaacgctggaaccccgagatccagtacacttccaactacaacaaatctgttaatgtggactttactgtggacactaatggtgtgtattcagagcctcgccccattggcaccagatacctgactcgtaatctgtaa

SEQ ID NO: 13047 - DNA, 2208 bp, Artificial Sequence
  source: /note="Description of Artificial Sequence: Synthetic polynucleotide"
atggctgccgatggttatcttccagattggctcgaggacactctctctgaaggaataagacagtggtggaagctcaaacctggcccaccaccaccaaagcccgcagagcggcatcaggacgacagcaggggtcttgtgcttcctgggtacaagtacctcggacccttcaacggactcgacaaaggagagccggtcaacgaggcagacgctgcggccctcgagcacgacaaggcctacgaccggcagctcgacagcggagacaacccgtacctcaagtacaaccacgccgacgcggagtttcaggagcgtcttaaagaagatacgtcttttgggggcaacctcggacgagcagtcttccaggcgaaaaagagggttcttgaacctctgggcctggttgaggaacctgttaagacggctccgggaaaaaagaggccggtagagcactctcctgcggagccagactcctcctcgggaaccggaaaagcgggccagcagcctgcaagaaagagattgaatttcggtcagactggagacgcagactccgtacctgacccccagcctctcggacagccaccagcagcccccacaagtttgggatctactacaatggctacaggcagtggcgcaccaatggcagacaataacgagggtgccgatggagtgggtaattcctcaggaaattggcattgcgattcccaatggctgggcgacagagtcatcaccaccagcacccgaacctgggccctgcccacctacaacaaccacctctacaagcaaatctccagccaatcaggagcatcgaacgacaaccactactttggctacagcaccccttgggggtattttgacttcaacagattccactgtcacttctccccacgtgactggcaaagactcatcaacaacaactggggattccgacccaagagactcaacttcaagctctttaacattcaagtcaaagaggtcacgcagaatgacggtacgacgacgattgccaataaccttaccagcacggttcaggtgtttactgactcggagtaccagctcccgtacgtcctcggctcggcgcatcaaggatgcctcccgccgtttccagcggacgtcttcatggtcccacagtatggatacctcaccccgaacaacgggagtcaggcggtaggacgctcttccttttactgcctggagtactttccttctcagatgctgcgtaccggaaacaactttaccttcagctacacctttgaggacgtgcctttccacagcagctacgctcacagccagagtttggaccggctgatgaatcctctgatcgaccagtatctgtattatctgaacaggacacaatcaaatagtggaactcttcagcagtctaggctactgtttagccaagctggacccaccagcatgtctcttcaagctaaaaactggctgcctggaccttgctacagacagcagcgtctgtcaaagcaggcaaacgacaacaacaacagcaactttccctggactgcggctacaaagtatcatctaaatggtcgggactcgttggttaatccaggaccagctatggccagccacaaagacgatgaagaaaagtttttccccatgcatggaaccctgatatttggtaaacaaggaacaaatgctaacgacgcggatttggaacatgtcatgattacagatgaagaagaaatcaggaccaccaatcccgtggctacagagcagtacggaaacgtgtcaaataatttgcaaaactcaaatactggtccaactacagaaaatgtcaatcaccagggagcgttacctggtatggtgtggcaggatcgagacgtgtacctgcagggacccatttgggccaagattcctcacaccgacggacactttcacccttctccactgatgggaggttttggactcaaacacccgcctcctcaaatcatgatcaaaaacactcctgttccagccaatcctcctacaaacttcagcgcggcaaagtttgcttccttcatcacacagtattccacgggacaggtcagcgtggagatcgagtgggagctgcagaaggagaacagcaaacgctggaaccccgagatccagtacacttccaactacaacaaatctgttaatgtggactttactgtggacactaatggtgtgtattcagagcctcgccccattggcaccagatacctgactcgtaatctgtaa

SEQ ID NO: 13048 - DNA, 2208 bp, Artificial Sequence
  source: /note="Description of Artificial Sequence: Synthetic polynucleotide"
atggctgccgatggttatcttccagattggctcgaggacactctctctgaaggaataagacagtggtggaagctcaaacctggcccaccaccaccaaagcccgcagagcggcatcaggacgacagcaggggtcttgtgcttcctgggtacaagtacctcggacccttcaacggactcgacaaaggagagccggtcaacgaggcagacgctgcggccctcgagcacgacaaggcctacgaccggcagctcgacagcggagacaacccgtacctcaagtacaaccacgccgacgcggagtttcaggagcgtcttaaagaagatacgtcttttgggggcaacctcggacgagcagccttccaggcgaaaaagagggttcttgaacctctgggcctggttgaggaacctgttaagacggctccgggaaaaaagaggccggtagagcactctcctgcggagccagactcctcctcgggaaccggaaaagcgggccagcagcctgcaagaaagagattgaatttcggtcagactggagacgcagactccgtacctgacccccagcctctcggacagccaccagcagcccccacaagtttgggatctactacaatggctacaggcagtggcgcaccaatggcagacaataacgagggtgccgatggagtgggtaattcctcaggaaattggcattgcgattcccaatggctgggcgacagagtcatcaccaccagcacccgaacctgggccctgcccacctacaacaaccacctctacaagcaaatctccagccaatcaggagcatcgaacgacaaccactactttggctacagcaccccttgggggtattttgacttcaacagattccactgtcacttctccccacgtgactggcaaagactcatcaacaacaactggggattccgacccaagagactcaacttcaagctctttaacattcaagtcaaagaggtcacgcagaatgacggtacgacgacgattgccaataaccttaccagcacggttcaggtgtttactgactcggagtaccagctcccgtacgtcctcggctcggcgcatcaaggatgcctcccgccgtttccagcggacgtcttcatggtcccacagtatggatacctcaccctgaacaacgggagtcaggcggtaggacgctcttccttttactgcctggagtactttccttctcagatgctgcgtaccggaaacaactttaccttcagctacacctttgaggacgtgcctttccacagcagctacgctcacagccagagtttggaccggctgatgaatcctctgatcgaccagtatctgtattatctgaacaggacacaatcaaatagtggaactcttcagcagtctaggctactgtttagccaagctggacccaccagcatgtctcttcaagctaaaaactggctgcctggaccttgctacagacagcagcgtctgtcaaagcaggcaaacgacaacaacaacagcaactttccctggactgcggctacaaagtatcatctaaatggtcgggactcgttggttaatccaggaccagctatggccagccacaaagacgatgaagaaaagtttttccccatgcatggaaccctgatatttggtaaacaaggaacaaatgctaacgacgcggatttggaacatgtcatgattacagatgaagaagaaatcaggaccaccaatcccgtggctacagagcagtacggaaacgtgtcaaataatttgcaaaactcaaatactggtccaactacagaaaatgtcaatcaccagggagcgttacctggtatggtgtggcaggatcgagacgtgtacctgcagggacccatttgggccaagattcctcacaccgacggacactttcacccttctccactgatgggaggttttggactcaaacacccgcctcctcaaatcatgatcaaaaacactcctgttccagccaatcctcctacaaacttcagcgcggcaaagtttgcttccttcatcacacagtattccacgggacaggtcagcgtggagatcgagtgggagctgcagaaggagaacagcaaacgctggaaccccgagatccagtacacttccaactacaacaaatctgttaatgtggactttactgtggacactaatggtgtgtattcagagcctcgccccattggcaccagatacctgactcgtaatctgtaa

SEQ ID NO: 13049 - DNA, 2208 bp, Artificial Sequence
  source: /note="Description of Artificial Sequence: Synthetic polynucleotide"
atggctgccgatggttatcttccagattggctcgaggacactctctctgaaggaataagacagtggtggaagctcaaacctggcccaccaccaccaaagcccgcagagcggcatcaggacgacagcaggggtcttgtgcttcctgggtacaagtacctcggacccttcaacggactcgacaaaggagagccggtcaacgaggcagacgctgcggccctcgagcacgacaaggcctacgaccggcagctcgacagcggagacaacccgtacctcaagtacaaccacgccgacgcggagtttcaggagcgtcttaaagaagatacgtcttttgggggcaacctcggacgagcagtcttccaggcgaaaaagagggttcttgaacctctgggcctggttgaggaacctgttaagacggctccgggaaaaaagaggccggtagagcactctcctgcggagccagactcctcctcgggaaccggaaaagcgggccagcagcctgcaagaaagagattgaatttcggtcagactggagacgcagactccgtacctgacccccagcctctcggacagccaccagcagcccccacaagtttgggatctactacaatggctacaggcagtggcgcaccaatggcagacaataacgagggtgccgatggagtgggtaattcctcaggaaattggcattgcgattcccaatggctgggcgacagagtcatcaccaccagcacccgaacctgggccctgcccacctacaacaaccacctctacaagcaaatctccagccaatcaggagcatcgaacgacaaccactactttggctacagcaccccttgggggtattttgacttcaacagattccactgtcacttctccccacgtgactggcaaagactcatcaacaacaactggggattccgacccaagagactcaacttcaagctctttaacattcaagtcaaagaggtcacgcagaatgacggtacgacgacgattgccaataaccttaccagcacggttcaggtgtttactgactcggagtaccagctcccgtacgtcctcggctcggcgcatcaaggatgcctcccgccgtttccagcggacgtcttcatggtcccacagtatggatacctcaccctgaacaacgggagtcaggcggtaggacgctcttccttttactgcctggagtactttcctcctcagatgctgcgtaccggaaacaactttaccttcagctacacctttgaggacgtgcctttccacagcagctacgctcacagccagagtttggaccggctgatgaatcctctgatcgaccagtatctgtattatctgaacaggacacaatcaaatagtggaactcttcagcagtctaggctactgtttagccaagctggacccaccagcatgtctcttcaagctaaaaactggctgcctggaccttgctacagacagcagcgtctgtcaaagcaggcaaacgacaacaacaacagcaactttccctggactgcggctacaaagtatcatctaaatggtcgggactcgttggttaatccaggaccagctatggccagccacaaagacgatgaagaaaagtttttccccatgcatggaaccctgatatttggtaaacaaggaacaaatgctaacgacgcggatttggaacatgtcatgattacagatgaagaagaaatcaggaccaccaatcccgtggctacagagcagtacggaaacgtgtcaaataatttgcaaaactcaaatactggtccaactacagaaaatgtcaatcaccagggagcgttacctggtatggtgtggcaggatcgagacgtgtacctgcagggacccatttgggccaagattcctcacaccgacggacactttcacccttctccactgatgggaggttttggactcaaacacccgcctcctcaaatcatgatcaaaaacactcctgttccagccaatcctcctacaaacttcagcgcggcaaagtttgcttccttcatcacacagtattccacgggacaggtcagcgtggagatcgagtgggagctgcagaaggagaacagcaaacgctggaaccccgagatccagtacacttccaactacaacaaatctgttaatgtggactttactgtggacactaatggtgtgtattcagagcctcgccccattggcaccagatacctgactcgtaatctgtaa

SEQ ID NO: 13050 - DNA, 2208 bp, Artificial Sequence
  source: /note="Description of Artificial Sequence: Synthetic polynucleotide"
atggctgccgatggttatcttccagattggctcgaggacactctccctgaaggaataagacagtggtggaagctcaaacctggcccaccaccaccaaagcccgcagagcggcatcaggacgacagcaggggtcttgtgcttcctgggtacaagtacctcggacccttcaacggactcgacaaaggagagccggtcaacgaggcagacgctgcggccctcgagcacgacaaggcctacgaccggcagctcgacagcggagacaacccgtacctcaagtacaaccacgccgacgcggagtttcaggagcgtcttaaagaagatacgtcttttgggggcaacctcggacgagcagtcttccaggcgaaaaagagggttcttgaacctctgggcctggttgaggaacctgttaagacggctccgggaaaaaagaggccggtagagcactctcctgcggagccagactcctcctcgggaaccggaaaagcgggccagcagcctgcaagaaagagattgaatttcggtcagactggagacgcagactccgtacctgacccccagcctctcggacagccaccagcagcccccacaagtttgggatctactacaatggctacaggcagtggcgcaccaatggcagacaataacgagggtgccgatggagtgggtaattcctcaggaaattggcattgcgattcccaatggctgggcgacagagtcatcaccaccagcacccgaacctgggccctgcccacctacaacaaccacctctacaagcaaatctccagccaatcaggagcatcgaacgacaaccactactttggctacagcaccccttgggggtattttgacttcaacagattccactgtcacttctccccacgtgactggcaaagactcatcaacaacaactggggattccgacccaagagactcaacttcaagctctttaacattcaagtcaaagaggtcacgcagaatgacggtacgacgacgattgccaataaccttaccagcacggttcaggtgtttactgactcggagtaccagctcccgtacgtcctcggctcggcgcatcaaggatgcctcccgccgtttccagcggacgtcttcatggtcccacagtatggatacctcaccctgaacaacgggagtcaggcggtaggacgctcttccttttactgcctggagtactttccttctcagatgctgcgtaccggaaacaactttaccttcagctacacctttgaggacgtgcctttccacagcagctacgctcacagccagagtttggaccggctgatgaatcctctgatcgaccagtatctgtattatctgaacaggacacaatcaaatagtggaactcttcagcagtctaggctactgtttagccaagctggacccaccagcatgtctcttcaagctaaaaactggctgcctggaccttgctacagacagcagcgtctgtcaaagcaggcaaacgacaacaacaacagcaactttccctggactgcggctacaaagtatcatctaaatggtcgggactcgttggttaatccaggaccagctatggccagccacaaagacgatgaagaaaagtttttccccatgcatggaaccctgatatttggtaaacaaggaacaaatgctaacgacgcggatttggaacatgtcatgattacagatgaagaagaaatcaggaccaccaatcccgtggctacagagcagtacggaaacgtgtcaaataatttgcaaaactcaaatactggtccaactacagaaaatgtcaatcaccagggagcgttacctggtatggtgtggcaggatcgagacgtgtacctgcagggacccatttgggccaagattcctcacaccgacggacactttcacccttctccactgatgggaggttttggactcaaacacccgcctcctcaaatcatgatcaaaaacactcctgttccagccaatcctcctacaaacttcagcgcggcaaagtttgcttccttcatcacacagtattccacgggacaggtcagcgtggagatcgagtgggagctgcagaaggagaacagcaaacgctggaaccccgagatccagtacacttccaactacaacaaatctgttaatgtggactttactgtggacactaatggtgtgtattcagagcctcgccccattggcaccagatacctgactcgtaatctgtaa

SEQ ID NO: 13051 - DNA, 2208 bp, Artificial Sequence
  source: /note="Description of Artificial Sequence: Synthetic polynucleotide"
atggctgccgatggttatcttccagattggctcgaggacactctctctgaaggaataagacagtggtggaagctcaaacctggcccaccaccaccaaagcccgcagagcggcatcaggacgacagcaggggtcttgtgcttcctgggtacaagtacctcggacccttcaacggactcgacaaaggagagccggtcaacgaggcagacgctgcggccctcgagcacgacaaggcctacgaccggcagctcgacagcggagacaacccgtacctcaagtacaaccacgccgacgcggagtttcaggagcgtcttaaagaagatacgtcttttgggggcaacctcggacgagcagtcttccaggcgaaaaagagggttcttgaacctctgggcctggttgaggaacctgttaagacggctccgggaaaaaagaggccggtagagcactctcctgcggagccagactcctcctcgggaaccggaaaagcgggccagcagcctgcaagaaagagattgaatttcggtcagactggagacgcagactccgtacctgacccccagcctctcggacagccaccagcagcccccacaagtttgggatctactacaatggctacaggcagtggcgcaccaatggcagacaataacgagggtgccgatggagtgggtaattcctcaggaaattggcattgcgattcccaatggctgggcgacagagtcatcaccaccagcacccgaacctgggccctgcccacctacaacaaccacctctacaagcaaatctccagccaatcaggagcatcgaacgacaaccactactttggctacagcaccccttgggggtattttgacttcaacagattccactgtcacttctccccacgtgactggcaaagactcatcaacaacaactggggattccgacccaagagactcaacttcaagctctttaacattcaagtcaaagaggtcacgcagaatgacggtacgacgacgattgccaataaccttaccagcacggttcaggtgtttactgactcggagtaccagctcccgtacgtcctcggctcggcgcatcaaggatgcctcccgccgtttccagcggacgtcttcatggtcccacagtatggatacctcaccctgaacaacgggagtcaggcggtaggacgctcttccttttactgcctggagtactttccttctcagatgctgcgtaccggaaacaactttaccttcagctacacctttgaggacgtgcctttccacagcagctacgctcacagccagagtttggaccggctgatgaatcctctgatcgaccagtatctgtattatctgaacaggacacaatcaaatagtggaactcttcagcagtctaggctactgtttagccaagctggacccaccagcatgtctcttcaagctaaaaactggctgcctggaccttgctacagacggcagcgtctgtcaaagcaggcaaacgacaacaacaacagcaactttccctggactgcggctacaaagtatcatctaaatggtcgggactcgttggttaatccaggaccagctatggccagccacaaagacgatgaagaaaagtttttccccatgcatggaaccctgatatttggtaaacaaggaacaaatgctaacgacgcggatttggaacatgtcatgattacagatgaagaagaaatcaggaccaccaatcccgtggctacagagcagtacggaaacgtgtcaaataatttgcaaaactcaaatactggtccaactacagaaaatgtcaatcaccagggagcgttacctggtatggtgtggcaggatcgagacgtgtacctgcagggacccatttgggccaagattcctcacaccgacggacactttcacccttctccactgatgggaggttttggactcaaacacccgcctcctcaaatcatgatcaaaaacactcctgttccagccaatcctcctacaaacttcagcgcggcaaagtttgcttccttcatcacacagtattccacgggacaggtcagcgtggagatcgagtgggagctgcagaaggagaacagcaaacgctggaaccccgagatccagtacacttccaactacaacaaatctgttaatgtggactttactgtggacactaatggtgtgtattcagagcctcgccccattggcaccagatacctgactcgtaatctgtaa

SEQ ID NO: 13052 - DNA, 2208 bp, Artificial Sequence
  source: /note="Description of Artificial Sequence: Synthetic polynucleotide"
atggctgccgatggttatcttccagattggctcgaggacactctctctgaaggaataagacagtggtggaagctcaaacctggcccaccaccaccaaagcccgcagagcggcatcaggacgacagcaggggtcttgtgcttcctgggtacaagtacctcggacccttcaacggactcgacaaaggagagccggtcaacgaggcagacgctgcggccctcgagcacgacaaggcctacgaccggcagctcgacagcggagacaacccgtacctcaagtacaaccacgccgacgcggagtttcaggagcgtcttaaagaagatacgtcttttgggggcaacctcggacgagcagtcttccaggcgaaaaagagggttcttgaacctctgggcctggttgaggaacctgttaagacggctccgggaaaaaagaggccggtagagcactctcctgcggagccagactcctcctcgggaaccggaaaagcgggccagcagcctgcaagaaagagattgaatttcggtcagactggagacgcagactccgtacctgacccccagcctctcggacagccaccagcagcccccacaagtttgggatctactacaatggctacaggcagtggcgcaccaatggcagacaataacgagggtgccgatggagtgggtaattcctcaggaaattggcattgcgattcccaatggctgggcgacagagtcatcaccaccagcacccgaacctgggccctgcccacctacaacaaccacctctacaagcaaatctccagccaatcaggagcatcgaacgacaaccactactttggctacagcaccccttgggggtattttgacttcaacagattccactgtcacttctccccacgtgactggcaaagactcatcaacaacaactggggattccgacccaagagactcaacttcaagctctttaacattcaagtcaaagaggtcacgcagaatgacggtacgacgacgattgccaataaccttaccagcacggttcaggtgtttactgactcggagtaccagctcccgtacgtcctcggctcggcgcatcaaggatgcctcccgccgtttccagcggacgtcttcatggtcccacagtatggatacctcaccctgaacaacgggagtcaggcggtaggacgctcttccttttactgcctggagtaccttccttctcagatgctgcgtaccggaaacaactttaccttcagctacacctttgaggacgtgcctttccacagcagctacgctcacagccagagtttggaccggctgatgaatcctctgatcgaccagtatctgtattatctgaacaggacacaatcaaatagtggaactcttcagcagtctaggctactgtttagccaagctggacccaccagcatgtctcttcaagctaaaaactggctgcctggaccttgctacagacagcagcgtctgtcaaagcaggcaaacgacaacaacaacagcaactttccctggactgcggctacaaagtatcatctaaatggtcgggactcgttggttaatccaggaccagctatggccagccacaaagacgatgaagaaaagtttttccccatgcatggaaccctgatatttggtaaacaaggaacaaatgctaacgacgcggatttggaacatgtcatgattacagatgaagaagaaatcaggaccaccaatcccgtggctacagagcagtacggaaacgtgtcaaataatttgcaaaactcaaatactggtccaactacagaaaatgtcaatcaccagggagcgttacctggtatggtgtggcaggatcgagacgtgtacctgcagggacccatttgggccaagattcctcacaccgacggacactttcacccttctccactgatgggaggttttggactcaaacacccgcctcctcaaatcatgatcaaaaacactcctgttccagccaatcctcctacaaacttcagcgcggcaaagtttgcttccttcatcacacagtattccacgggacaggtcagcgtggagatcgagtgggagctgcagaaggagaacagcaaacgctggaaccccgagatccagtacacttccaactacaacaaatctgttaatgtggactttactgtggacactaatggtgtgtattcagagcctcgccccattggcaccagatacctgactcgtaatctgtaa

SEQ ID NO: 13053 - DNA, 2208 bp, Artificial Sequence
  source: /note="Description of Artificial Sequence: Synthetic polynucleotide"
atggctgccgatggttatcttccagattggctcgaggacactctctctgaaggaataagacagtggtggaagctcaaacctggcccaccaccaccaaagcccgcagagcggcatcaggacgacagcaggggtcttgtgcttcctgggtacaagtacctcggacccttcaacggactcgacaaaggagagccggtcaacgaggcagacgctgcggccctcgagcacgacaaggcctacgaccggcagctcgacagcggagacaacccgtacctcaagtacaaccacgccgacgcggagtttcaggagcgtcttaaagaagatacgtcttttgggggcaacctcggacgagcagtcttccaggcgaaaaagagggttcttgaacctctgggcctggttgaggaacctgttaagacggctccgggaaaaaagaggccggtagagcactctcctgcggagccagactcctcctcgggaaccggaaaagcgggccagcagcctgcaagaaagagattgaatttcggtcagactggagacgcagactccgtacctgacccccagcctctcggacagccaccagcagcccccacaagtttgggatctactacaatggctacaggcagtggcgcaccaatggcagacaataacgagggtgccgatggagtgggtaattcctcaggaaattggcattgcgattcccaatggctgggcgacagagtcatcaccaccagcacccgaacctgggccctgcccacctacaacaaccacctctacaagcaaatctccagccaatcaggagcatcgaacgacaaccactactttggctacagcaccccttgggggtattttgacttcaacagattccactgtcacttctccccacgtgactggcaaagactcatcaacaacaactggggattccgacccaagagactcaacttcaagctctttaacattcaagtcaaagaggtcacgcagaatgacggtacgacgacgattgccaataaccttaccagcacggttcaggtgtttactgactcggagtaccagctcccgtacgtcctcggctcggcgcatcaaggatgcctcccgccgtttccagcggacgtcttcatggtcccacagtatggatacctcaccctgaacaacgggagtcaggcggtaggacgctcttccttttactgcctggagtactttccttctcagatgctgcgtaccggaaacaactttaccttcagctacacctttgaggacgtgcctttccacagcagctacgctcacagccagagtttggaccggctgatgaatcctctgatcgaccagtatctgtattatctgaacaggacacaatcaaatagtggaactcttcagcagtctaggctactgtttagccaagctggacccaccagcatgtctcttcaagctaaaaactggctgcctggaccttgctacagacagcagcgtctgtcaaagcaggcaaacgacaacaacaacggcaactttccctggactgcggctacaaagtatcatctaaatggtcgggactcgttggttaatccaggaccagctatggccagccacaaagacgatgaagaaaagtttttccccatgcatggaaccctgatatttggtaaacaaggaacaaatgctaacgacgcggatttggaacatgtcatgattacagatgaagaagaaatcaggaccaccaatcccgtggctacagagcagtacggaaacgtgtcaaataatttgcaaaactcaaatactggtccaactacagaaaatgtcaatcaccagggagcgttacctggtatggtgtggcaggatcgagacgtgtacctgcagggacccatttgggccaagattcctcacaccgacggacactttcacccttctccactgatgggaggttttggactcaaacacccgcctcctcaaatcatgatcaaaaacactcctgttccagccaatcctcctacaaacttcagcgcggcaaagtttgcttccttcatcacacagtattccacgggacaggtcagcgtggagatcgagtgggagctgcagaaggagaacagcaaacgctggaaccccgagatccagtacacttccaactacaacaaatctgttaatgtggactttactgtggacactaatggtgtgtattcagagcctcgccccattggcaccagatacctgactcgtaatctgtaa

SEQ ID NO: 13054 - DNA, 2208 bp, Artificial Sequence
  source: /note="Description of Artificial Sequence: Synthetic polynucleotide"
atggctgccgatggttatcttccagattggctcgaggacactctctctgaaggaataagacagtggtggaagctcaaacctggcccaccaccaccaaagcccgcagagcggcatcaggacgacagcaggggtcttgtgcttcctgggtacaagtacctcggacccttcaacggactcgacaaaggagagccggtcaacgaggcagacgctgcggccctcgagcacgacaaggcctacgaccggcagttcgacagcggagacaacccgtacctcaagtacaaccacgccgacgcggagtttcaggagcgtcttaaagaagatacgtcttttgggggcaacctcggacgagcagtcttccaggcgaaaaagagggttcttgaacctctgggcctggttgaggaacctgttaagacggctccgggaaaaaagaggccggtagagcactctcctgcggagccagactcctcctcgggaaccggaaaagcgggccagcagcctgcaagaaagagattgaatttcggtcagactggagacgcagactccgtacctgacccccagcctctcggacagccaccagcagcccccacaagtttgggatctactacaatggctacaggcagtggcgcaccaatggcagacaataacgagggtgccgatggagtgggtaattcctcaggaaattggcattgcgattcccaatggctgggcgacagagtcatcaccaccagcacccgaacctgggccctgcccacctacaacaaccacctctacaagcaaatctccagccaatcaggagcatcgaacgacaaccactactttggctacagcaccccttgggggtattttgacttcaacagattccactgtcacttctccccacgtgactggcaaagactcatcaacaacaactggggattccgacccaagagactcaacttcaagctctttaacattcaagtcaaagaggtcacgcagaatgacggtacgacgacgattgccaataaccttaccagcacggttcaggtgtttactgactcggagtaccagctcccgtacgtcctcggctcggcgcatcaaggatgcctcccgccgtttccagcggacgtcttcatggtcccacagtatggatacctcaccctgaacaacgggagtcaggcggtaggacgctcttccttttactgcctggagtactttccttctcagatgctgcgtaccggaaacaactttaccttcagctacacctttgaggacgtgcctttccacagcagctacgctcacagccagagtttggaccggctgatgaatcctctgatcgaccagtatctgtattatctgaacaggacacaatcaaatagtggaactcttcagcagtctaggctactgtttagccaagctggacccaccagcatgtctcttcaagctaaaaactggctgcctggaccttgctacagacagcagcgtctgtcaaagcaggcaaacgacaacaacaacagcaactttccctggactgcggctacaaagtatcatctaaatggtcgggactcgttggttaatccaggaccagctatggccagccacaaagacgatgaagaaaagtttttccccatgcatggaaccctgatatttggtaaacaaggaacaaatgctaacgacgcggatttggaacatgtcatgattacagatgaagaagaaatcaggaccaccaatcccgtggctacagagcagtacggaaacgtgtcaaataatttgcaaaactcaaatactggtccaactacagaaaatgtcaatcaccagggagcgttacctggtatggtgtggcaggatcgagacgtgtacctgcagggacccatttgggccaagattcctcacaccgacggacactttcacccttctccactgatgggaggttttggactcaaacacccgcctcctcaaatcatgatcaaaaacactcctgttccagccaatcctcctacaaacttcagcgcggcaaagtttgcttccttcatcacacagtattccacgggacaggtcagcgtggagatcgagtgggagctgcagaaggagaacagcaaacgctggaaccccgagatccagtacacttccaactacaacaaatctgttaatgtggactttactgtggacactaatggtgtgtattcagagcctcgccccattggcaccagatacctgactcgtaatctgtaa

SEQ ID NO: 13055 - DNA, 2208 bp, Artificial Sequence
  source: /note="Description of Artificial Sequence: Synthetic polynucleotide"
atggctgccgatggttatcttccagattggctcgaggacactctctctgaaggaataagacagtggtggaagctcaaacctggcccaccaccaccaaagcccgcagagcggcatcaggacgacagcaggggtcttgtgcttcctgggtacaagtacctcggacccttcaacggactcgacaaaggagagccggtcaacgaggcagacgctgcggccctcgagcacgacaaggcctacgaccggcagctcgacagcggagacaacccgtacctcaagtacaaccacgccgacgcggagtttcaggagcgtcttaaagaagatacgtcttttgggggcaacctcggacgagcagtcttccaggcgaaaaagagggttcttgaacctctgggcctggttgaggaacctgttaagacggctccgggaaaaaagaggccggtagagcactctcctgcggagccagactcctcctcgggaaccggaaaagcgggccagcagcctgcaagaaagagattgaatttcggtcagactggagacgcagactccgtacctgacccccagcctctcggacagccaccagcagcccccacaagtttgggatctactacaatggctacaggcagtggcgcaccaatggcagacaataacgagggtgccgatggagtgggtaattcctcaggaaattggcattgcgattcccaatggctgggcgacagagtcatcaccaccagcacccgaacctgggccctgcccacctacaacaaccacctctacaagcaaatctccagccaatcaggagcatcgaacgacaaccactactttggctacagcaccccttgggggtattttgacttcaacagattccactgtcacttctccccacgtgaccggcaaagactcatcaacaacaactggggattccgacccaagagactcaacttcaagctctttaacattcaagtcaaagaggtcacgcagaatgacggtacgacgacgattgccaataaccttaccagcacggttcaggtgtttactgactcggagtaccagctcccgtacgtcctcggctcggcgcatcaaggatgcctcccgccgtttccagcggacgtcttcatggtcccacagtatggatacctcaccctgaacaacgggagtcaggcggtaggacgctcttccttttactgcctggagtactttccttctcagatgctgcgtaccggaaacaactttaccttcagctacacctttgaggacgtgcctttccacagcagctacgctcacagccagagtttggaccggctgatgaatcctctgatcgaccagtatctgtattatctgaacaggacacaatcaaatagtggaactcttcagcagtctaggctactgtttagccaagctggacccaccagcatgtctcttcaagctaaaaactggctgcctggaccttgctacagacagcagcgtctgtcaaagcaggcaaacgacaacaacaacagcaactttccctggactgcggctacaaagtatcatctaaatggtcgggactcgttggttaatccaggaccagctatggccagccacaaagacgatgaagaaaagtttttccccatgcatggaaccctgatatttggtaaacaaggaacaaatgctaacgacgcggatttggaacatgtcatgattacagatgaagaagaaatcaggaccaccaatcccgtggctacagagcagtacggaaacgtgtcaaataatttgcaaaactcaaatactggtccaactacagaaaatgtcaatcaccagggagcgttacctggtatggtgtggcaggatcgagacgtgtacctgcagggacccatttgggccaagattcctcacaccgacggacactttcacccttctccactgatgggaggttttggactcaaacacccgcctcctcaaatcatgatcaaaaacactcctgttccagccaatcctcctacaaacttcagcgcggcaaagtttgcttccttcatcacacagtattccacgggacaggtcagcgtggagatcgagtgggagctgcagaaggagaacagcaaacgctggaaccccgagatccagtacacttccaactacaacaaatctgttaatgtggactttactgtggacactaatggtgtgtattcagagcctcgccccattggcaccagatacctgactcgtaatctgtaa

SEQ ID NO: 13056 - DNA, 2208 bp, Artificial Sequence
  source: /note="Description of Artificial Sequence: Synthetic polynucleotide"
atggctgccgatggttatcttccagattggctcgaggacactctctctgaaggaataagacagtggtggaagctcaaacctggcccaccaccaccaaagcccgcagagcggcatcaggacgacagcaggggtcttgtgcttcctgggtacaagtacctcggacccttcaacggactcgacaaaggagagccggtcaacgaggcagacgctgcggccctcgagcacgacaaggcctacgaccggcagctcgacagcggagacaacccgtacctcaagtacaaccacgccgacgcggagtttcaggagcgtcttaaagaagatacgtcttttgggggcaacctcggacgagcagtcttccaggcgaaaaagagggttcttgaacctctgggcctggttgaggaacctgttaagacggctccgggaaaaaagaggccggtagagcactctcctgcggagccagactcctcctcgggaaccggaaaagcgggccagcagcctgcaagaaagagattgaatttcggtcagactggagacgcagactccgtacctgacccccagcctctcggacagccaccagcagcccccacaagtttgggatctactacaatggctacaggcagtggcgcaccaatggcagacaataacgagggtgccgatggagtgggtaattcctcaggaaattggcattgcgattcccaatggctgggcgacagagtcatcaccaccagcacccgaacctgggccctgcccgcctacaacaaccacctctacaagcaaatctccagccaatcaggagcatcgaacgacaaccactactttggctacagcaccccttgggggtattttgacttcaacagattccactgtcacttctccccacgtgactggcaaagactcatcaacaacaactggggattccgacccaagagactcaacttcaagctctttaacattcaagtcaaagaggtcacgcagaatgacggtacgacgacgattgccaataaccttaccagcacggttcaggtgtttactgactcggagtaccagctcccgtacgtcctcggctcggcgcatcaaggatgcctcccgccgtttccagcggacgtcttcatggtcccacagtatggatacctcaccctgaacaacgggagtcaggcggtaggacgctcttccttttactgcctggagtactttccttctcagatgctgcgtaccggaaacaactttaccttcagctacacctttgaggacgtgcctttccacagcagctacgctcacagccagagtttggaccggctgatgaatcctctgatcgaccagtatctgtattatctgaacaggacacaatcaaatagtggaactcttcagcagtctaggctactgtttagccaagctggacccaccagcatgtctcttcaagctaaaaactggctgcctggaccttgctacagacagcagcgtctgtcaaagcaggcaaacgacaacaacaacagcaactttccctggactgcggctacaaagtatcatctaaatggtcgggactcgttggttaatccaggaccagctatggccagccacaaagacgatgaagaaaagtttttccccatgcatggaaccctgatatttggtaaacaaggaacaaatgctaacgacgcggatttggaacatgtcatgattacagatgaagaagaaatcaggaccaccaatcccgtggctacagagcagtacggaaacgtgtcaaataatttgcaaaactcaaatactggtccaactacagaaaatgtcaatcaccagggagcgttacctggtatggtgtggcaggatcgagacgtgtacctgcagggacccatttgggccaagattcctcacaccgacggacactttcacccttctccactgatgggaggttttggactcaaacacccgcctcctcaaatcatgatcaaaaacactcctgttccagccaatcctcctacaaacttcagcgcggcaaagtttgcttccttcatcacacagtattccacgggacaggtcagcgtggagatcgagtgggagctgcagaaggagaacagcaaacgctggaaccccgagatccagtacacttccaactacaacaaatctgttaatgtggactttactgtggacactaatggtgtgtattcagagcctcgccccattggcaccagatacctgactcgtaatctgtaa

SEQ ID NO: 13057 - DNA, 2205 bp, Artificial Sequence
  source: /note="Description of Artificial Sequence: Synthetic polynucleotide"
atggctgccgatggttatcttccagattggctcgaggacactctctctgaaggaataagacagtggtggaagctcaaacctggcccaccaccaccaaagcccgcagagcggcatcaggacgacagcaggggtcttgtgcttcctgggtacaagtacctcggacccttcaacggactcgacaaaggagagccggtcaacgaggcagacgctgcggccctcgagcacgacaaggcctacgaccggcagctcgacagcggagacaacccgtacctcaagtacaaccacgccgacgcggagtttcaggagcgtcttaaagaagatacgtcttttgggggcaacctcggacgagcagtcttccaggcgaaaaagagggttcttgaacctctgggcctggttgaggaacctgttaagacggctccgggaaaaaagaggccggtagagcactctcctgcggagccagactcctcctcgggaaccggaaaagcgggccagcagcctgcaagaaagagattgaatttcggtcagactggagacgcagactccgtacctgacccccagcctctcggacagccaccagcagcccccacaagtttgggatctactacaatggctacaggcagtggcgcaccaatggcagacaataacgagggtgccgatggagtgggtaattcctcaggaaattggcattgcgattcccaatggctgggcgacagagtcatcaccaccagcacccgaacctgggccctgcccacctacaacaaccacctctacaagcaaatctccagccaatcaggagcatcgaacgacaaccactactttggctacagcaccccttgggggtattttgacttcaacagattccactgtcacttctccccacgtgactggcaaagactcatcaacaacaactggggattccgacccaagagactcaacttcaagctctttaacattcaagtcaaagaggtcacgcagaatgacggtacgacgacgattgccaataaccttaccagcacggttcaggtgtttactgactcggagtaccagctcccgtacgtcctcggctcggcgcatcaaggatgcctcccgccgtttccagcggacgccttcatggtcccacagtatggatacctcaccctgaacaacgggagtcaggcggtaggacgctcttccttttactgcctggagtactttccttctcagatgctgcgtaccggaaacaactttaccttcagctacacctttgaggacgtgcctttccacagcagctacgctcacagccagagtttggaccggctgatgaatcctctgatcgaccagtatctgtattatctgaacaggacacaatcaaatagtggaactcttcagcagtctaggctactgtttagccaagctggacccaccagcatgtctcttcaagctaaaaactggctgcctggaccttgctacagacagcagcgtctgtcaaagcaggcaaacgacaacaacagcaactttccctggactgcggctacaaagtatcatctaaatggtcgggactcgttggttaatccaggaccagctatggccagccacaaagacgatgaagaaaagtttttccccatgcatggaaccctgatatttggtaaacaaggaacaaatgctaacgacgcggatttggaacatgtcatgattacagatgaagaagaaatcaggaccaccaatcccgtggctacagagcagtacggaaacgtgtcaaataatttgcaaaactcaaatactggtccaactacagaaaatgtcaatcaccagggagcgttacctggtatggtgtggcaggatcgagacgtgtacctgcagggacccatttgggccaagattcctcacaccgacggacactttcacccttctccactgatgggaggttttggactcaaacacccgcctcctcaaatcatgatcaaaaacactcctgttccagccaatcctcctacaaacttcagcgcggcaaagtttgcttccttcatcacacagtattccacgggacaggtcagcgtggagatcgagtgggagctgcagaaggagaacagcaaacgctggaaccccgagatccagtacacttccaactacaacaaatctgttaatgtggactttactgtggacactaatggtgtgtattcagagcctcgccccattggcaccagatacctgactcgtaatctgtaa

SEQ ID NO: 13058 - DNA, 2208 bp, Artificial Sequence
  source: /note="Description of Artificial Sequence: Synthetic polynucleotide"
atggctgccgatggttatcttccagattggctcgaggacactctctctgaaggaataagacagtggtggaagctcaaacctggcccaccaccaccaaagcccgcagagcggcatcaggacgacagcaggggtcttgtgcttcctgggtacaagtacctcggacccttcaacggactcgacaaaggagagccggtcaacgaggcagacgctgcggccctcgagcacgacaaggcctacgaccggcagctcgacagcggagacaacccgtacctcaagtacaaccacgccgacgcggagtttcaggagcgtcttaaagaagatacgtcttttgggggcaacctcggacgagcagtcttccaggcgaaaaagagggttcttgaacctctgggcctggttgaggaacctgttaagacggctccgggaaaaaagaggccggtagagcactctcctgcggagccagactcctcctcgggaaccggaaaagcgggccagcagcctgcaagaaagagattgaatttcggtcagactggagacgcagactccgtacctgacccccagcctctcggacagccaccagcagcccccacaagtttgggatctactacaatggctacaggcagtggcgcaccaatggcagacaataacgagggtgccgatggagtgggtaattcctcaggaaattggcattgcgattcccaatggctgggcgacagagtcatcaccaccagcacccgaacctgggccctgcccacctacaacaaccacctctacaagcaaatctccagccaatcaggagcatcgaacgacaaccactactttggctacagcaccccttgggggtattttgacttcaacagattccactgtcacttctccccacgtggctggcaaagactcatcaacaacaactggggattccgacccaagagactcaacttcaagctctttaacattcaagtcaaagaggtcacgcagaatgacggtacgacgacgattgccaataaccttaccagcacggttcaggtgtttactgactcggagtaccagctcccgtacgtcctcggctcggcgcatcaaggatgcctcccgccgtttccagcggacgtcttcatggtcccacagtatggatacctcaccctgaacaacgggagtcaggcggtaggacgctcttccttttactgcctggagtactttccttctcagatgctgcgtaccggaaacaactttaccttcagctacacctttgaggacgtgcctttccacagcagctacgctcacagccagagtttggaccggctgatgaatcctctgatcgaccagtatctgtattatctgaacaggacacaatcaaatagtggaactcttcagcagtctaggctactgtttagccaagctggacccaccagcatgtctcttcaagctaaaaactggctgcctggaccttgctacagacagcagcgtctgtcaaagcaggcaaacgacaacaacaacagcaactttccctggactgcggctacaaagtatcatctaaatggtcgggactcgttggttaatccaggaccagctatggccagccacaaagacgatgaagaaaagtttttccccatgcatggaaccctgatatttggtaaacaaggaacaaatgctaacgacgcggatttggaacatgtcatgattacagatgaagaagaaatcaggaccaccaatcccgtggctacagagcagtacggaaacgtgtcaaataatttgcaaaactcaaatactggtccaactacagaaaatgtcaatcaccagggagcgttacctggtatggtgtggcaggatcgagacgtgtacctgcagggacccatttgggccaagattcctcacaccgacggacactttcacccttctccactgatgggaggttttggactcaaacacccgcctcctcaaatcatgatcaaaaacactcctgttccagccaatcctcctacaaacttcagcgcggcaaagtttgcttccttcatcacacagtattccacgggacaggtcagcgtggagatcgagtgggagctgcagaaggagaacagcaaacgctggaaccccgagatccagtacacttccaactacaacaaatctgttaatgtggactttactgtggacactaatggtgtgtattcagagcctcgccccattggcaccagatacctgactcgtaatctgtaa

SEQ ID NO: 13059 - DNA, 2208 bp, Artificial Sequence
  source: /note="Description of Artificial Sequence: Synthetic polynucleotide"
atggctgccgatggttatcttccagattggctcgaggacactctctctgaaggaataagacagtggtggaagctcaaacctggcccaccaccaccaaagcccgcagagcggcatcaggacgacagcaggggtcttgtgcttcctgggtacaagtacctcggacccttcaacggactcgacaaaggagagccggtcaacgaggcagacgctgcggccctcgagcacgacaaggcctacgaccggcagctcgacagcggagacaacccgtacctcaagtacaaccacgccgacgcggagtttcaggagcgtcttaaagaagatacgtcttttgggggcaacctcggacgagcagtcttccaggcgaaaaagagggttcttgaacctctgggcctggttgaggaacctgttaagacggctccgggaaaaaagaggccggtagagcactctcctgcggagccagactcctcctcgggaaccggaaaagcgggccagcagcctgcaagaaagagattgaatttcggtcagactggagacgcagactccgtacctgacccccagcctctcggacagccaccagcagcccccacaagtttgggatctactacaatggctacaggcagtggcgcaccaatggcagacaataacgagggtgccgatggagtgggtaattcctcaggaaattggcattgcgattcccaatggctgggcgacagagtcatcaccaccagcacccgaacctgggccctgcccacctacaacaaccacctctacaagcaaatctccagccaatcaggagcatcgaacgacaaccactactttggctacagcaccccttgggggtattttgacttcaacagattccactgtcacttctccccacgtgactggcaaagactcatcaacaacaactggggattccgacccaagagactcaacttcaagctctttaacattcaagtcaaagaggtcacgcagaatgacggtacgacgacgattgccaataaccttaccagcacggttcaggtgtttactgactcggagtaccagctcccgtacgtcctcggctcggcgcatcaaggatgcctcccgccgtttccagcggacgtcttcatggtcccacagtatggatacctcaccctgaacaacgggagtcaggcggtaggacgctcttccttttactgcctggagtactttccttctcagatgctgcgtaccggaaacaactttaccttcagctacacctttgaggacgtgcctttccacagcagctacgctcacagccagagtttggaccggctgatgaatcctctgatcgaccagtatctgtattatctgaacgggacacaatcaaatagtggaactcttcagcagtctaggctactgtttagccaagctggacccaccagcatgtctcttcaagctaaaaactggctgcctggaccttgctacagacagcagcgtctgtcaaagcaggcaaacgacaacaacaacagcaactttccctggactgcggctacaaagtatcatctaaatggtcgggactcgttggttaatccaggaccagctatggccagccacaaagacgatgaagaaaagtttttccccatgcatggaaccctgatatttggtaaacaaggaacaaatgctaacgacgcggatttggaacatgtcatgattacagatgaagaagaaatcaggaccaccaatcccgtggctacagagcagtacggaaacgtgtcaaataatttgcaaaactcaaatactggtccaactacagaaaatgtcaatcaccagggagcgttacctggtatggtgtggcaggatcgagacgtgtacctgcagggacccatttgggccaagattcctcacaccgacggacactttcacccttctccactgatgggaggttttggactcaaacacccgcctcctcaaatcatgatcaaaaacactcctgttccagccaatcctcctacaaacttcagcgcggcaaagtttgcttccttcatcacacagtattccacgggacaggtcagcgtggagatcgagtgggagctgcagaaggagaacagcaaacgctggaaccccgagatccagtacacttccaactacaacaaatctgttaatgtggactttactgtggacactaatggtgtgtattcagagcctcgccccattggcaccagatacctgactcgtaatctgtaa

SEQ ID NO: 13060 - DNA, 2208 bp, Artificial Sequence
  source: /note="Description of Artificial Sequence: Synthetic polynucleotide"
atggctgccgatggttatcttccagattggctcgaggacactctctctgaaggaataagacagtggtggaagctcaaacctggcccaccaccaccaaagcccgcagagcggcatcaggacgacagcaggggtcttgtgcttcctgggtacaagtacctcggacccttcaacggactcgacaaaggagagccggtcaacgaggcagacgctgcggccctcgagcacgacaaggcctacgaccggcagctcgacagcggagacaacccgtacctcaagtacaaccacgccgacgcggagtttcaggagcgtcttaaagaagatacgtcttttgggggcaacctcggacgagcagtcttccaggcgaaaaagagggttcttgaacctctgggcctggttgaggaacctgttaagacggctccgggaaaaaagaggccggtagagcactctcctgcggagccagactcctcctcgggaaccggaaaagcgggccagcagcctgcaagaaagagattgaatttcggtcagactggagacgcagactccgtacctgacccccagcctctcggacagccaccagcagcccccacaagtttgggatctactacaatggctacaggcagtggcgcaccaatggcagacaataacgagggtgccgatggagtgggtaattcctcaggaaattggcattgcgattcccaatggctgggcgacagagtcatcaccaccagcacccgaacctgggccctgcccacctacaacaaccacctctacaagcaaatctccagccaatcaggagcatcgaacgacaaccactactttggctacagcaccccttgggggtattttgacttcaacagattccactgtcacctctccccacgtgactggcaaagactcatcaacaacaactggggattccgacccaagagactcaacttcaagctctttaacattcaagtcaaagaggtcacgcagaatgacggtacgacgacgattgccaataaccttaccagcacggttcaggtgtttactgactcggagtaccagctcccgtacgtcctcggctcggcgcatcaaggatgcctcccgccgtttccagcggacgtcttcatggtcccacagtatggatacctcaccctgaacaacgggagtcaggcggtaggacgctcttccttttactgcctggagtactttccttctcagatgctgcgtaccggaaacaactttaccttcagctacacctttgaggacgtgcctttccacagcagctacgctcacagccagagtttggaccggctgatgaatcctctgatcgaccagtatctgtattatctgaacaggacacaatcaaatagtggaactcttcagcagtctaggctactgtttagccaagctggacccaccagcatgtctcttcaagctaaaaactggctgcctggaccttgctacagacagcagcgtctgtcaaagcaggcaaacgacaacaacaacagcaactttccctggactgcggctacaaagtatcatctaaatggtcgggactcgttggttaatccaggaccagctatggccagccacaaagacgatgaagaaaagtttttccccatgcatggaaccctgatatttggtaaacaaggaacaaatgctaacgacgcggatttggaacatgtcatgattacagatgaagaagaaatcaggaccaccaatcccgtggctacagagcagtacggaaacgtgtcaaataatttgcaaaactcaaatactggtccaactacagaaaatgtcaatcaccagggagcgttacctggtatggtgtggcaggatcgagacgtgtacctgcagggacccatttgggccaagattcctcacaccgacggacactttcacccttctccactgatgggaggttttggactcaaacacccgcctcctcaaatcatgatcaaaaacactcctgttccagccaatcctcctacaaacttcagcgcggcaaagtttgcttccttcatcacacagtattccacgggacaggtcagcgtggagatcgagtgggagctgcagaaggagaacagcaaacgctggaaccccgagatccagtacacttccaactacaacaaatctgttaatgtggactttactgtggacactaatggtgtgtattcagagcctcgccccattggcaccagatacctgactcgtaatctgtaa

SEQ ID NO: 13061 - DNA, 2208 bp, Artificial Sequence
  source: /note="Description of Artificial Sequence: Synthetic polynucleotide"
atggctgccgatggttatcttccagattggctcgaggacactctctctgaaggaataagacagtggtggaagctcaaacctggcccaccaccaccaaagcccgcagagcggcatcaggacgacagcaggggtcttgtgcttcctgggtacaagtacctcggacccttcaacggactcgacaaaggagagccggtcaacgaggcagacgctgcggccctcgggcacgacaaggcctacgaccggcagctcgacagcggagacaacccgtacctcaagtacaaccacgccgacgcggagtttcaggagcgtcttaaagaagatacgtcttttgggggcaacctcggacgagcagtcttccaggcgaaaaagagggttcttgaacctctgggcctggttgaggaacctgttaagacggctccgggaaaaaagaggccggtagagcactctcctgcggagccagactcctcctcgggaaccggaaaagcgggccagcagcctgcaagaaagagattgaatttcggtcagactggagacgcagactccgtacctgacccccagcctctcggacagccaccagcagcccccacaagtttgggatctactacaatggctacaggcagtggcgcaccaatggcagacaataacgagggtgccgatggagtgggtaattcctcaggaaattggcattgcgattcccaatggctgggcgacagagtcatcaccaccagcacccgaacctgggccctgcccacctacaacaaccacctctacaagcaaatctccagccaatcaggagcatcgaacgacgaccactactttggctacagcaccccttgggggtattttgacttcaacagattccactgtcacttctccccacgtgactggcaaagactcatcaacaacaactggggattccgacccaagagactcaacttcaagctctttaacattcaagtcaaagaggtcacgcagaatgacggtacgacgacgattgccaataaccttaccagcacggttcaggtgtttactgactcggagtaccagctcccgtacgtcctcggctcggcgcatcaaggatgcctcccgccgtttccagcggacgtcttcatggtcccacagtatggatacctcaccctgaacaacgggagtcaggcggtaggacgctcttccttttactgcctggagtactttccttctcagatgctgcgtaccggaaacaactttaccttcagctacacctttgaggacgtgcctttccacagcagctacgctcacagccagagtttggaccggctgatgaatcctctgatcgaccagtatctgtattatctgaacaggacacaatcaaatagtggaactcttcagcagtctaggctactgtttagccaagctggacccaccagcatgtctcttcaagctaaaaactggctgcctggaccttgctacagacagcagcgtctgtcaaagcaggcaaacgacaacaacaacagcaactttccctggactgcggctacaaagtatcatctaaatggtcgggactcgttggttaatccaggaccagctatggccagccacaaagacgatgaagaaaagtttttccccatgcatggaaccctgatatttggtaaacaaggaacaaatgctaacgacgcggatttggaacatgtcatgattacagatgaagaagaaatcaggaccaccaatcccgtggctacagagcagtacggaaacgtgtcaaataatttgcaaaactcaaatactggtccaactacagaaaatgtcaatcaccagggagcgttacctggtatggtgtggcaggatcgagacgtgtacctgcagggacccatttgggccaagattcctcacaccgacggacactttcacccttctccactgatgggaggttttggactcaaacacccgcctcctcaaatcatgatcaaaaacactcctgttccagccaatcctcctacaaacttcagcgcggcaaagtttgcttccttcatcacacagtattccacgggacaggtcagcgtggagatcgagtgggagctgcagaaggagaacagcaaacgctggaaccccgagatccagtacacttccaactacaacaaatctgttaatgtggactttactgtggacactaatggtgtgtattcagagcctcgccccattggcaccagatacctgactcgtaatctgtaa

SEQ ID NO: 13062 - DNA, 2208 bp, Artificial Sequence
  source: /note="Description of Artificial Sequence: Synthetic polynucleotide"
atggctgccgatggttatcttccagattggctcgaggacactctctctgaaggaataagacagtggtggaagctcaaacctggcccaccaccaccaaagcccgcagagcggcatcaggacgacagcaggggtcttgtgcttcctgggtacaagtacctcggacccttcaacggactcgacaaaggagagccggtcaacgaggcagacgctgcggccctcgagcacgacaaggcctacgaccggcagctcgacagcggagacaacccgtacctcaagtacaaccacgccgacgcggagtttcaggagcgtcttaaagaagatacgtcttttgggggcaacctcggacgagcagtcttccaggcgaaaaagagggttcttgaacctctgggcctggttgaggaacctgttaagacggctccgggaaaaaagaggccggtagagcactctcctgcggagccagactcctcctcgggaaccggaaaagcgggccagcagcctgcaagaaagagattgaatttcggtcagactggagacgcagactccgtacctgacccccagcctctcggacagccaccagcagcccccacaagtttgggatctactacaatggctacaggcagtggcgcaccaatggcagacaataacgagggtgccgatggagtgggtaattcctcaggaaattggcattgcgattcccaatggctgggcgacagagtcatcaccaccagcacccgaacctgggccctgcccacctacaacaaccacctctacaagcaaatctccagccaatcaggagcatcgaacgacaaccactactttggctacagcaccccttgggggtattttgacttcaacagattccactgtcacttctccccacgtgactggcaaagactcatcaacaacaactggggattccgacccaagagactcaacttcaagctctttaacattcaagtcaaagaggtcacgcagaatgacggtacgacgacgattgccaataaccttaccagcacggttcaggtgtttactgactcggagtaccagctcccgtacgtcctcggctcggcgcatcaaggatgcctcccgccgtttccagcggacgtcttcatggtcccacagtatggatacctcaccctgaacaacgggagtcaggcggtaggacgctcttccttttactgcctggagtactttccttctcagatgctgcgtaccggaaacaactttaccttcagctacacctttgaggacgtgcctttccacagcagctacgctcacagccagagtttggaccggctgatgaatcctctgatcgaccagtatctgtattatctgaacaggacacaatcaaatagtggaactcttcagcagtctaggctactgtttagccaagctggacccaccagcatgtctcttcaagctaaaaactggctgcctggaccttgctacagacagcagcgtctgtcaaagcaggcaaacgacaacaacaacagcaactttccctggactgcggctacaaagtatcatctaaatggtcgggactcgttggttaatccaggaccagctatggccagccacaaagacgatgaagaaaagtttttccccatgcatggaaccctgatatttggtaaacaaggaacaaatgctaacgacgcggatttggaacatgtcatgattacagatgaagaagaaatcaggaccaccaatcccgtggctacagagcagtacggaaacgtgtcaaataatttgcaaaactcaaatactggtccaactacagaaaatgtcaatcaccagggagcgttacctggtatggtgtggcaggatcgagacgtgtacctgcagggacccatttgggccaagattcctcacaccgacggacactttcgcccttctccactgatgggaggttttggactcaaacacccgcctcctcaaatcatgatcaaaaacactcctgttccagccaatcctcctacaaacttcagcgcggcaaagtttgcttccttcatcacacagtattccacgggacaggtcagcgtggagatcgagtgggagctgcagaaggagaacagcaaacgctggaaccccgagatccagtacacttccaactacaacaaatctgttaatgtggactttactgtggacactaatggtgtgtattcagagcctcgccccattggcaccagatacctgactcgtaatctgtaa

SEQ ID NO: 13063 - DNA, 2208 bp, Artificial Sequence
  source: /note="Description of Artificial Sequence: Synthetic polynucleotide"
atggctgccgatggttatcttccagattggctcgaggacactctctctgaaggaataagacagtggtggaagctcaaacctggcccaccaccaccaaagcccgcagagcggcatcaggacgacagcaggggtcttgtgcttcctgggtacaagtacctcggacccttcaacggactcgacaaaggagagccggtcaacgaggcagacgctgcggccctcgagcacgacaaggcctacgaccggcagctcgacagcggagacaacccgtacctcaagtacaaccacgccgacgcggagtttcaggagcgtcttaaagaagatacgtcttttgggggcaacctcggacgagcagtcttccaggcgaaaaagagggttcttgaacctctgggcctggttgaggaacctgttaagacggctccgggaaaaaagaggccggtagagcactctcctgcggagccagactcctcctcgggaaccggaaaagcgggccagcagcctgcaagaaagagattgaatttcggtcagactggagacgcagactccgtacctgacccccagcctctcggacagccaccagcagcccccacaagtttgggatctactacaatggctacaggcagtggcgcaccaatggcagacaataacgagggtgccgatggagtgggtaattcctcaggaaattggcattgcgattcccaatggctgggcgacagagtcatcaccaccagcacccgaacctgggccctgcccacctacaacaaccacctctacaagcaaatctccagccaatcaggagcatcgaacgacaaccactactttggctacagcaccccttgggggtattttgacttcaacagattccactgtcacttctccccacgtgactggcaaagactcatcaacaacaactggggattccgacccaagagactcaacttcaagctctttaacattcaagtcaaagaggtcacgcagaatgacggtacgacgacgattgccaataaccttaccagcacggttcaggtgtttactgactcggagtaccagctcccgtacgtcctcggctcggcgcatcaaggatgcctcccgccgtttccagcggacgtcttcatggtcccacagtatggatacctcaccctgaacaacgggagtcaggcggtaggacgctcttccttttactgcctggagtactttccttctcagatgctgcgtaccggaaacaactttaccttcagctacacctttgaggacgtgcctttccacagcagctacgctcacagccagagtttggaccggctgatgaatcctctgatcgaccagtatctgtattatctgaacaggacacaatcaaatagtggaactcttcagcagtctaggctactgtttagccaagctggacccaccagcatgtctcttcaagctaaaaactggctgcctggaccttgctacagacagcagcgtctgtcaaagcaggcaaacgacaacaacaacagcaactttccctggactgcggctacaaagtatcatctaaatggtcgggactcgttggttaatccaggaccagctatggccagccacaaagacgatgaagaaaagtttttccccatgcatggaaccctgatatttggtaaacaaggaacaaatgctaacgacgcggatttggaacatgtcatgattacagatgaagaagaaatcaggaccaccaatcccgtggctacagagcagtacggaaacgtgtcaaataatttgcaaaactcaaatactggtccaactacagaaaatgtcaatcaccagggagcgttacctggtatggtgtggcaggatcgagacgtgtacctgcagggacccatttgggccaagattcctcacaccgacggacactttcacccttctccactgatgggaggttttggactcaaacacccgcctcctcaaatcatgatcaaaaacactcctgttccagccaatcctcctacaaacttcagcgcggcaaagtctgcttccttcatcacacagtattccacgggacaggtcagcgtggagatcgagtgggagctgcagaaggagaacagcaaacgctggaaccccgagatccagtacacttccaactacaacaaatctgttaatgtggactttactgtggacactaatggtgtgtattcagagcctcgccccattggcaccagatacctgactcgtaatctgtaa

SEQ ID NO: 13064 - DNA, 2208 bp, Artificial Sequence
  source: /note="Description of Artificial Sequence: Synthetic polynucleotide"
atggctgccgatggttatcttccagattggctcgaggacactctctctgaaggaataagacagtggtggaagctcaaacctggcccaccaccaccaaagcccgcagagcggcatcaggacgacagcaggggtcttgtgcttcctgggtacaagtacctcggacccttcaacggactcgacaaaggagagccggtcaacgaggcagacgctgcggccctcgagcacgacaaggcctacgaccggcagctcgacagcggagacaacccgtacctcaagtacaaccacgccgacgcggagtttcaggagcgtcttaaagaagatacgtcttttgggggcaacctcggacgagcagtcttccaggcgaaaaagagggttcttgaacctctgggcctggttgaggaacctgttaagacggctccgggaaaaaagaggccggtagagcactctcctgcggagccagactcctcctcgggaaccggaaaagcgggccagcagcctgcaagaaagagattgaatttcggtcagactggagacgcagactccgtacctgacccccagcctctcggacagccaccagcagcccccacaagtttgggatctactacaatggctacaggcagtggcgcaccaatggcagacaataacgagggtgccgatggagtgggtaattcctcaggaaattggcattgcgattcccaatggctgggcgacagagtcatcaccaccagcacccgaacctgggccctgcccacctacaacaaccacctctacaagcaaatctccagccaatcaggagcatcgaacgacaaccactactttggctacagcaccccttgggggtattttgacttcaacagattccactgtcacttctccccacgtgactggcaaagactcatcaacaacaactggggattccgacccaagagactcaacttcaagctctttaacattcaagtcaaaggggtcacgcagaatgacggtacgacgacgattgccaataaccttaccagcacggttcaggtgtttactgactcggagtaccagctcccgtacgtcctcggctcggcgcatcaaggatgcctcccgccgtttccagcggacgtcttcatggtcccacagtatggatacctcaccctgaacaacgggagtcaggcggtaggacgctcttccttttactgcctggagtactttccttctcagatgctgcgtaccggaaacaactttaccttcagctacacctttgaggacgtgcctttccacagcagctacgctcacagccagagtttggaccggctgatgaatcctctgatcgaccagtatctgtattatctgaacaggacacaatcaaatagtggaactcttcagcagtctaggctactgtttagccaagctggacccaccagcatgtctcttcaagctaaaaactggctgcctggaccttgctacagacagcagcgtctgtcaaagcaggcaaacgacaacaacaacagcaactttccctggactgcggctacaaagtatcatctaaatggtcgggactcgttggttaatccaggaccagctatggccagccacaaagacgatgaagaaaagtttttccccatgcatggaaccctgatatttggtaaacaaggaacaaatgctaacgacgcggatttggaacatgtcatgattacagatgaagaagaaatcaggaccaccaatcccgtggctacagagcagtacggaaacgtgtcaaataatttgcaaaactcaaatactggtccaactacagaaaatgtcaatcaccagggagcgttacctggtatggtgtggcaggatcgagacgtgtacctgcagggacccatttgggccaagattcctcacaccgacggacactttcacccttctccactgatgggaggttttggactcaaacacccgcctcctcaaatcatgatcaaaaacactcctgttccagccaatcctcctacaaacttcagcgcggcaaagtttgcttccttcatcacacagtattccacgggacaggtcagcgtggagatcgagtgggagctgcagaaggagaacagcaaacgctggaaccccgagatccagtacacttccaactacaacaaatctgttaatgtggactttactgtggacactaatggtgtgtattcagagcctcgccccattggcaccagatacctgactcgtaatctgtaa

SEQ ID NO: 13065 - DNA, 2208 bp, Artificial Sequence
  source: /note="Description of Artificial Sequence: Synthetic polynucleotide"
atggctgccgatggttatcttccagattggctcgaggacactctctctgaaggaataagacagtggtggaagctcaaacctggcccaccaccaccaaagcccgcagagcggcatcaggacgacagcaggggtcttgtgcttcctgggtacaagtacctcggacccttcaacggactcgacaaaggagagccggtcaacgaggcagacgctgcggccctcgagcacgacaaggcctacgaccggcagctcgacagcggagacaacccgtacctcaagtacaaccacgccgacgcggagtttcaggagcgtcttaaagaagatacgtcttttgggggcaacctcggacgagcagtcttccaggcgaaaaagagggttcttgaacctctgggcctggttgaggaacctgttaagacggctccgggaaaaaagaggccggtagagcactctcctgcggagccagactcctcctcgggaaccggaaaagcgggccagcagcctgcaagaaagagattgaatttcggtcagactggagacgcagactccgtacctgacccccagcctctcggacagccaccagcagcccccacaagtttgggatctactacaatggctacaggcagtggcgcaccaatggcagacaataacgagggtgccgatggagtgggtaattcctcaggaaattggcattgcgattcccaatggctgggcgacagagtcatcaccaccagcacccgaacctgggccctgcccacctacaacaaccacctctacaagcaaatctccagccaatcaggagcatcgaacgacaaccactactttggctacagcaccccttgggggtattttgacttcaacagattccactgtcacttctccccacgtgactggcaaagactcatcaacaacaactggggattccgacccaagagactcaacttcaagctctttaacattcaagtcaaagaggtcacgcagaatgacggtacgacgacgattgccaataaccttaccagcacggttcaggtgtttactgactcggagtaccagctcccgtacgtcctcggctcggcgcatcaaggatgcctcccgccgtttccagcggacgtcttcatggtcccacagtatggatacctcaccctgaacaacgggagtcaggcggtaggacgctcttccttttactgcctggagtactttccttctcagatgctgcgtaccggaaacaactttaccttcagctacacctttgaggacgtgcctttccacagcagctacgctcacagccagagtttggaccggctgatgaatcctctgatcgaccagtatctgtattatctgaacaggacacaatcaaatagtggaactcttcagcagtctaggctactgtttagccaagctggacccaccagcatgtctcttcaagctaaaaactggctgcctggaccttgctacagacagcagcgtctgtcaaagcaggcaaacgacaacaacaacagcaactttccctggactgcggctacaaagtatcatctaaatggtcgggactcgttggttaatccaggaccagctatggccagccacaaagacgatgaagaaaagtttttccccatgcatggaaccccgatatttggtaaacaaggaacaaatgctaacgacgcggatttggaacatgtcatgattacagatgaagaagaaatcaggaccaccaatcccgtggctacagagcagtacggaaacgtgtcaaataatttgcaaaactcaaatactggtccaactacagaaaatgtcaatcaccagggagcgttacctggtatggtgtggcaggatcgagacgtgtacctgcagggacccatttgggccaagattcctcacaccgacggacactttcacccttctccactgatgggaggttttggactcaaacacccgcctcctcaaatcatgatcaaaaacactcctgttccagccaatcctcctacaaacttcagcgcggcaaagtttgcttccttcatcacacagtattccacgggacaggtcagcgtggagatcgagtgggagctgcagaaggagaacagcaaacgctggaaccccgagatccagtacacttccaactacaacaaatctgttaatgtggactttactgtggacactaatggtgtgtattcagagcctcgccccattggcaccagatacctgactcgtaatctgtaa

SEQ ID NO: 13066 - DNA, 2208 bp, Artificial Sequence
  source: /note="Description of Artificial Sequence: Synthetic polynucleotide"
atggctgccgatggttatcttccagattggctcgaggacactctctctgaaggaataagacagtggtggaagctcaaacctggcccaccaccaccaaagcccgcagagcggcatcaggacgacagcaggggtcttgtgcttcctgggtacaagtacctcggacccttcaacggactcgacaaaggagagccggtcaacgaggcagacgctgcggccctcgagcacgacaaggcctacgaccggcagctcgacagcggagacaacccgtacctcaagtacaaccacgccgacgcggagtttcaggagcgtcttaaagaagatacgtcttttgggggcaacctcggacgagcagtcttccaggcgaaaaagggggttcttgaacctctgggcctggttgaggaacctgttaagacggctccgggaaaaaagaggccggtagagcactctcctgcggagccagactcctcctcgggaaccggaaaagcgggccagcagcctgcaagaaagagattgaatttcggtcagactggagacgcagactccgtacctgacccccagcctctcggacagccaccagcagcccccacaagtttgggatctactacaatggctacaggcagtggcgcaccaatggcagacaataacgagggtgccgatggagtgggtaattcctcaggaaattggcattgcgattcccaatggctgggcgacagagtcatcaccaccagcacccgaacctgggccctgcccacctacaacaaccacctctacaagcaaatctccagccaatcaggagcatcgaacgacaaccactactttggctacagcaccccttgggggtattttgacttcaacagattccactgtcacttctccccacgtgactggcaaagactcatcaacaacaactggggattccgacccaagagactcaacttcaagctctttaacattcaagtcaaagaggtcacgcagaatgacggtacgacgacgattgccaataaccttaccagcacggttcaggtgtttactgactcggagtaccagctcccgtacgtcctcggctcggcgcatcaaggatgcctcccgccgtttccagcggacgtcttcatggtcccacagtatggatacctcaccctgaacaacgggagtcaggcggtaggacgctcttccttttactgcctggagtactttccttctcagatgctgcgtaccggaaacaactttaccttcagctacacctttgaggacgtgcctttccacagcagctacgctcacagccagagtttggaccggctgatgaatcctctgatcgaccagtatctgtattatctgaacaggacacaatcaaatagtggaactcttcagcagtctaggctactgtttagccaagctggacccaccagcatgtctcttcaagctaaaaactggctgcctggaccttgctacagacagcagcgtctgtcaaagcaggcaaacgacaacaacaacagcaactttccctggactgcggctacaaagtatcatctaaatggtcgggactcgttggttaatccaggaccagctatggccagccacaaagacgatgaagaaaagtttttccccatgcatggaaccctgatatttggtaaacaaggaacaaatgctaacgacgcggatttggaacatgtcatgattacagatgaagaagaaatcaggaccaccaatcccgtggctacagagcagtacggaaacgtgtcaaataatttgcaaaactcaaatactggtccaactacagaaaatgtcaatcaccagggagcgttacctggtatggtgtggcaggatcgagacgtgtacctgcagggacccatttgggccaagattcctcacaccgacggacactttcacccttctccactgatgggaggttttggactcaaacacccgcctcctcaaatcatgatcaaaaacactcctgttccagccaatcctcctacaaacttcagcgcggcaaagtttgcttccttcatcacacagtattccacgggacaggtcagcgtggagatcgagtgggagctgcagaaggagaacagcaaacgctggaaccccgagatccagtacacttccaactacaacaaatctgttaatgtggactttactgtggacactaatggtgtgtattcagagcctcgccccattggcaccagatacctgactcgtaatctgtaa

SEQ ID NO: 13067 - DNA, 2208 bp, Artificial Sequence
  source: /note="Description of Artificial Sequence: Synthetic polynucleotide"
atggctgccgatggttatcttccagattggctcgaggacactctctctgaaggaataagacagtggtggaagctcaaacctggcccaccaccaccaaagcccgcagagcggcatcaggacgacagcaggggtcttgtgcttcctgggtacaagtacctcggacccttcaacggactcgacaaaggagagccggtcaacgaggcagacgctgcggccctcgagcacgacaaggcctacgaccggcagctcgacagcggagacaacccgtacctcaagtacaaccacgccgacgcggagtttcaggagcgtcttaaagaagatacgtcttttgggggcaacctcggacgagcagtcttccaggcgaaaaagagggttcttgaacctctgggcctggttgaggaacctgttaagacggctccgggaaaaaagaggccggtagagcactctcctgcggagccagactcctcctcgggaaccggaaaagcgggccagcagcctgcaagaaagagattgaatttcggtcagactggagacgcagactccgtacctgacccccagcctctcggacagccaccagcagcccccacaagtttgggatctactacaatggctacaggcagtggcgcaccaatggcagacaataacgagggtgccgatggagtgggtaattcctcaggaaattggcattgcgattcccaatggctgggcgacagagtcatcaccaccagcacccgaacctgggccctgcccacctacaacaaccacctctacaagcaaatctccagccaatcaggagcatcgaacgacaaccactactttggctacagcaccccttgggggtattttgacttcaacagattccactgtcacttctccccacgtgactggcaaagactcatcaacaacaactggggattccgacccaagagactcaacttcaagctctttaacattcaagtcaaagaggtcacgcagaatgacggtacgacgacgattgccaataaccttaccagcacggttcaggtgtttactgactcggagtaccagctcccgtacgtcctcggctcggcgcatcaaggatgcctcccgccgtttccagcggacgtcttcatggtcccacagtatggatacctcaccctgaacaacgggagtcaggcggtaggacgctcttccttttactgcctggagtactttccttctcagatgctgcgtaccggaaacaactttaccttcagctacacctttgaggacgtgcctttccacagcagctacgctcacagccagagtttggaccggctgatgaatcctctgatcggccagtatctgtattatctgaacaggacacaatcaaatagtggaactcttcagcagtctaggctactgtttagccaagctggacccaccagcatgtctcttcaagctaaaaactggctgcctggaccttgctacagacagcagcgtctgccaaagcaggcaaacgacaacaacaacagcaactttccctggactgcggctacaaagtatcatctaaatggtcgggactcgttggttaatccaggaccagctatggccagccacaaagacgatgaagaaaagtttttccccatgcatggaaccctgatatttggtaaacaaggaacaaatgctaacgacgcggatttggaacatgtcatgattacagatgaagaagaaatcaggaccaccaatcccgtggctacagagcagtacggaaacgtgtcaaataatttgcaaaactcaaatactggtccaactacagaaaatgtcaatcaccagggagcgttacctggtatggtgtggcaggatcgagacgtgtacctgcagggacccatttgggccaagattcctcacaccgacggacactttcacccttctccactgatgggaggttttggactcaaacacccgcctcctcaaatcatgatcaaaaacactcctgttccagccaatcctcctacaaacttcagcgcggcaaagtttgcttccttcatcacacagtattccacgggacaggtcagcgtggagatcgagtgggagctgcagaaggagaacagcaaacgctggaaccccgagatccagtacacttccaactacaacaaatctgttaatgtggactttactgtggacactaatggtgtgtattcagagcctcgccccattggcaccagatacctgactcgtaatctgtaa

SEQ ID NO: 13068 - DNA, 2208 bp, Artificial Sequence
  source: /note="Description of Artificial Sequence: Synthetic polynucleotide"
atggctgccgatggttatcttccagattggctcgaggacactctctctgaaggaataagacagtggtggaagctcaaacctggcccaccaccaccaaagcccgcagagcggcatcaggacgacagcaggggtcttgtgcttcctgggtacaagtacctcggacccttcaacggactcgacaaaggagagccggtcaacgaggcagacgctgcggccctcgagcacgacaaggcctacgaccggcagctcgacagcggagacaacccgtacctcaagtacaaccacgccgacgcggagtttcaggagcgtcttaaagaagatacgtcttttgggggcaacctcggacgagcagtcttccaggcgaaaaagagggttcttgaacctctgggcctggttgaggaacctgttaagacggctccgggaaaaaagaggccggtagagcactctcctgcggagccagactcctcctcgggaaccggaaaagcgggccagcagcctgcaagaaagagattgaatttcggtcagactggagacgcagactccgtacctgacccccagcctctcggacagccaccagcagcccccacaagtttgggatctactacaatggctacaggcagtggcgcaccaatggcagacaataacgagggtgccgatggagtgggtaattcctcaggaaattggcattgcgattcccaatggctgggcgacagagtcatcaccaccagcacccgaacctgggccctgcccacctacaacaaccacctctacaagcaaatctccagccaatcaggagcatcgaacgacaaccactactttggctacagcaccccttgggggtattttgacttcaacagattccactgtcacttctccccacgtgactggcaaagactcatcaacaacaactggggattccgacccaagagactcaacttcaagctctttaacattcaagtcaaagaggtcacgcagaatgacggtacgacgacgattgccaataaccttaccagcacggttcaggtgtttactgactcggagtaccagctcccgtacgtcctcggctcggcgcatcaaggatgcctcccgccgtttccagcggacgtcttcatggtcccacagtatggatacctcaccctgaacaacgggagtcaggcggtaggacgctcttccttttactgcctggagtactttccttctcagatgctgcgtaccggaaacaactttaccttcagctacacctttgaggacgtgcctttccacagcagctacgctcacagccagagtttggaccggctgatgaatcctctgatcgaccagtatctgtattatctgaacaggacacaatcaaatagtggaactcttcagcagtctaggctactgtttagccaagctggacccaccagcatgtctcttcaagctaaaaactggctgcctggaccttgctacagacagcagcgtctgtcaaagcaggcaaacgacaacaacaacagcaactttccctggactgcggctacaaagtatcatctaaatggtcgggactcgttggttaatccaggaccagctatggccagccacaaagacgatgaagaaaagtttttccccatgcatggaaccctgatatttggtaaacaaggaacaaatgctaacgacgcggatttggaacatgtcatgattacagatgaagaagaaatcaggaccaccaatcccgtggctacagagcagtacggaaacgtgtcaaataatttgcaaaactcaaatactggtccaactacagaaaatgtcaatcaccagggagcgttacctggtatggtgtggcaggatcgagacgtgtacctgcagggacccatttgggccaagattcctcacaccgacggacgctttcacccttctccactgatgggaggttttggactcaaacacccgcctcctcaaatcatgatcaaaaacactcctgttccagccaatcctcctacaaacttcagcgcggcaaagtttgcttccttcatcacacagtattccacgggacaggtcagcgtggagatcgagtgggagctgcagaaggagaacagcaaacgctggaaccccgagatccagtacacttccaactacaacaaatctgttaatgtggactttactgtggacactaatggtgtgtattcagagcctcgccccattggcaccagatacctgactcgtaatctgtaa

SEQ ID NO: 13069 - DNA, 2208 bp, Artificial Sequence
  source: /note="Description of Artificial Sequence: Synthetic polynucleotide"
atggctgccgatggttatcttccagattggctcgaggacactctctctgaaggaataagacagtggtggaagctcaaacctggcccaccaccaccaaagcccgcagagcggcatcaggacgacagcaggggtcttgtgcttcctgggtacaagtacctcggacccttcaacggactcgacaaaggagagccggtcaacgaggcagacgctgcggccctcgagcacgacaaggcctacgaccggcagctcgacagcggagacaacccgtacctcaagtacaaccacgccgacgcggagtttcaggagcgtcttaaagaagatacgtcttttgggggcaacctcggacgagcagtcttccaggcgaaaaagagggttcttgaacctctgggcctggttgaggaacctgttaagacggctccgggaaaaaagaggccggtagagcactctcctgcggagccagactcctcctcgggaaccggaaaagcgggccagcagcctgcaagaaagagattgaatttcggtcagactggagacgcagactccgtacctgacccccagcctctcggacagccaccagcagcccccacaagtttgggatctactacaatggctacaggcagtggcgcaccaatggcagacaataacgagggtgccgatggagtgggtaattcctcaggaaattggcattgcgattcccaatggctgggcgacagagtcatcaccaccagcacccgaacctgggccctgcccacctacaacaaccacctctacaagcaaatctccagccaatcaggagcatcgaacgacaaccactactttggctacagcaccccttgggggtattttgacttcaacagattccactgtcacttctccccacgtgactggcaaagactcatcaacaacaactggggattccgacccaagagactcaacttcaagctctttaacattcaagtcaaagaggtcacgcagaatgacggtacgacgacgattgccaataaccttaccagcacggttcaggtgtttactgactcggagtaccagctcccgtacgtcctcggctcggcgcatcaaggatgcctcccgccgtttccagcggacgtcttcatggtcccacagtatggatacctcaccctgaacaacgggagtcaggcggtaggacgctcttccttttactgcctggagtactttccttctcagatgctgcgtaccggaaacaactttaccttcagctacacctttgaggacgtgcctttccacagcagctacgctcacagccagagtttggaccggctgatgaatcctctgatcgaccagtatctgtattatctgaacaggacacaatcaaatagtggaactcttcagcagtctaggctactgtttagccaagctggacccaccagcatgtctcttcaagctaaaaactggctgcctggaccttgctacagacagcagcgtctgtcaaagcaggcaaacgacaacaacaacagcaactttccctggactgcggctacaaagtatcatctaaatggtcgggactcgttggttaatccaggaccagctatggccagccacaaagacgatgaagaaaagtttttccccatgcatggagccctgatatttggtaaacaaggaacaaatgctaacgacgcggatttggaacatgtcatgattacagatgaagaagaaatcaggaccaccaatcccgtggctacagagcagtacggaaacgtgtcaaataatttgcaaaactcaaatactggtccaactacagaaaatgtcaatcaccagggagcgttacctggtatggtgtggcaggatcgagacgtgtacctgcagggacccatttgggccaagattcctcacaccgacggacactttcacccttctccactgatgggaggttttggactcaaacacccgcctcctcaaatcatgatcaaaaacactcctgttccagccaatcctcctacaaacttcagcgcggcaaagtttgcttccttcatcacacagtattccacgggacaggtcagcgtggagatcgagtgggagctgcagaaggagaacagcaaacgctggaaccccgagatccagtacacttccaactacaacaaatctgttaatgtggactttactgtggacactaatggtgtgtattcagagcctcgccccattggcaccagatacctgactcgtaatctgtaa

SEQ ID NO: 13070 - DNA, 2208 bp, Artificial Sequence
  source: /note="Description of Artificial Sequence: Synthetic polynucleotide"
atggctgccgatggttatcttccagattggctcgaggacactctctctgaaggaataagacagtggtggaagctcaaacctggcccaccaccaccaaagcccgcagagcggcatcaggacgacagcaggggtcttgtgcttcctgggtacaagtacctcggacccttcaacggactcgacaaaggagagccggtcaacgaggcagacgctgcggccctcgagcacgacaaggcctacgaccggcagctcgacagcggagacaacccgtacctcaagtacaaccacgccgacgcggagtttcaggagcgtcttaaagaagatacgtcttttgggggcaacctcggacgagcagtcttccaggcgaaaaagagggttcttgaacctctgggcctggttgaggaacctgttaagacggctccgggaaaaaagaggccggtagagcactctcctgcggagccagactcctcctcgggaaccggaaaagcgggccagcagcctgcaagaaagagattgaatttcggtcagactggagacgcagactccgtacctgacccccagcctctcggacagccaccagcagcccccacaagtttgggatctactacaatggctacaggcagtggcgcaccaatggcagacaataacgagggtgccgatggagtgggtaattcctcaggaaattggcattgcgattcccaatggctgggcgacagagtcatcaccaccagcacccgaacctgggccctgcccacctacaacaaccacctctacaagcaaatctccagccaatcaggagcatcgaacgacaaccactactttggctacagcaccccttgggggtattttgacttcaacagattccactgtcacttctccccacgtgactggcaaagactcatcaacaacaactggggattccgacccaagagactcaacttcaagctctttaacattcaagtcaaagaggtcacgcagaatgacggtacgacgacgattgccaataaccttaccagcacggttcaggtgtttactgactcggagtaccagctcccgtacgtcctcggctcggcgcatcaaggatgcctcccgccgtttccagcggacgtcttcatggtcccacagtatggatacctcaccctgaacaacgggagtcaggcggtaggacgctcttccttttactgcctggagtactttccttctcagatgctgcgtaccggaaacaactttaccttcagctacacctttgaggacgtgcctttccacagcagctacgctcacagccagagtttggaccggctgatgaatcctctgatcgaccagtatctgtattatctgaacaggacacaatcaaatagtggaactcttcagcagtctaggctactgtttagccaagctggacccaccagcatgtctcttcaagctaaaaactggctgcctggaccttgctacagacagcagcgtctgtcaaagcaggcaaacgacaacaacaacagcaactttccctggactgcggctacaaagtatcatctaaatggtcgggactcgttggttaatccaggaccagctatggccagccacaaagacgatgaagaaaagtttttccccatgcatggaaccctgatatttggtaaacaaggaacaaatgctaacgacgcggatttggaacatgccatgattacagatgaagaagaaatcaggaccaccaatcccgtggctacagagcagtacggaaacgtgtcaaataatttgcaaaactcaaatactggtccaactacagaaaatgtcaatcaccagggagcgttacctggtatggtgtggcaggatcgagacgtgtacctgcagggacccatttgggccaagattcctcacaccgacggacactttcacccttctccactgatgggaggttttggactcaaacacccgcctcctcaaatcatgatcaaaaacactcctgttccagccaatcctcctacaaacttcagcgcggcaaagtttgcttccttcatcacacagtattccacgggacaggtcagcgtggagatcgagtgggagctgcagaaggagaacagcaaacgctggaaccccgagatccagtacacttccaactacaacaaatctgttaatgtggactttactgtggacactaatggtgtgtattcagagcctcgccccattggcaccagatacctgactcgtaatctgtaa

SEQ ID NO: 13071 - DNA, 2208 bp, Artificial Sequence
  source: /note="Description of Artificial Sequence: Synthetic polynucleotide"
atggctgccgatggttatcttccagattggctcgaggacactctctctgaaggaataagacagtggtggaagctcaaacctggcccaccaccaccaaagcccgcagagcggcatcaggacgacagcaggggtcttgtgcttcctgggtacaagtacctcggacccttcaacggactcgacaaaggagagccggtcaacgaggcagacgctgcggccctcgagcacgacaaggcctacgaccggcagctcgacagcggagacaacccgtacctcaagtacaaccacgccgacgcggagtttcaggagcgtcttaaagaagatacgtcttttgggggcaacctcggacgagcagtcttccaggcgaaaaagagggttcttgaacctctgggcctggttgaggaacctgttaagacggctccgggaaaaaagaggccggtagagcactctcctgcggagccagactcctcctcgggaaccggaaaagcgggccagcagcctgcaagaaagagattgaatttcggtcagactggagacgcagactccgtacctgacccccagcctctcggacagccaccagcagcccccacaagtttgggatctactacaatggctacaggcagtggcgcaccaatggcagacaataacgagggtgccgatggagtgggtaattcctcaggaaattggcattgcgattcccaatggctgggcgacagagtcatcaccaccagcacccgaacctgggccctgcccacctacaacaaccacctctacaagcaaatctccagccaatcaggagcatcgaacgacaaccactactttggctacagcaccccttgggggtattttgacttcaacagattccactgtcacttctccccacgtgactggcaaagactcatcaacaacaactggggattccgacccaagagactcaacttcaagctctttaacattcaagtcaaagaggtcacgcagaatgacggtacgacgacgattgccaataaccttaccagcacggttcaggtgtttactgactcggagtaccagctcccgtacgtcctcggctcggcgcatcaaggatgcctcccgccgtttccagcggacgtcttcatggtcccacagtatggatacctcaccctgaacaacgggagtcaggcggtaggacgctcttccttttactgcctggagtactttccttctcagatgctgcgtaccggaaacaactttaccttcagctacacctttgaggacgtgcctttccacagcagctacgctcacagccagagtttggaccggctgatgaatcctctgatcgaccagtatctgtattatctgaacaggacacaatcaaatagtggaactcttcagcagtctaggctactgtttagccaagctggacccaccagcatgtctcttcaagctaaaaactggctgcctggaccttgctacagacagcagcgtctgtcaaagcaggcaaacgacaacaacaacagcaactttccctggactgcggctacaaagtatcatctaaatggtcgggactcgttggttaatccaggaccagctatggccagccacaaagacgatgaagaaaagtttttccccatgcatggaaccctgatatttggtaaacaaggaacaaatgctaacgacgcggatttggaacatgtcatgattacagatgaagaagaaatcaggaccaccaatcccgtggctacagagcagtacggaaacgtgtcaaataatttgcaaaactcaaatactggtccaactacagaaaatgtcaatcaccagggagcgttacctggtatggtgtggcaggatcgagacgtgtacctgcagggacccatttgggccaagattcctcacaccgacggacactttcacccttctccactgatgggaggttttggactcaaacacccgcctcctcaaatcatgatcaaaaacactcctgttccagccaatcctcctacaaacttcagcgcggcaaagtttgcttccttcatcacacagtattccacgggacaggtcagcgtggagatcgagtgggagctgcagaaggagaacagcaaacgctggaaccccgagatccggtacacttccaactacaacaaatctgttaatgtggactttactgtggacactaatggtgtgtattcagagcctcgccccattggcaccagatacctgactcgtaatctgtaa

SEQ ID NO: 13072 - DNA, 2208 bp, Artificial Sequence
  source: /note="Description of Artificial Sequence: Synthetic polynucleotide"
atggctgccgatggttatcttccagattggctcgaggacactctctctgaaggaataagacagtggtggaagctcaaacctggcccaccaccaccaaagcccgcagagcggcatcaggacgacagcaggggtcttgtgcttcctgggtacaagtacctcggacccttcaacggactcgacaaaggagagccggtcaacgaggcagacgctgcggccctcgagcacgacaaggcctacgaccggcagctcgacagcggagacaacccgtacctcaagtacaaccacgccgacgcggagtttcaggagcgtcttaaagaagatacgtcttttgggggcaacctcggacgagcagtcttccaggcgaaaaagagggttcttgaacctctgggcctggttgaggaacctgttaagacggctccgggaaaaaagaggccggtagagcactctcctgcggagccagactcctcctcgggaaccggaaaagcgggccagcagcctgcaagaaagagattgaatttcggtcagactggagacgcagactccgtacctgacccccagcctctcggacagccaccagcagcccccacaagtttgggatctactacaatggctacaggcagtggcgcaccaatggcagacaataacgagggtgccgatggagtgggtaattcctcaggaaattggcattgcgattcccaatggctgggcgacagagtcatcaccaccagcacccgaacctgggccctgcccacctacaacaaccacctctacaagcaaatctccagccaatcaggagcatcgaacgacaaccactactttggctacagcaccccttgggggtattttgacttcaacagattccactgtcacttctccccacgtgactggcaaagactcatcaacaacaactggggattccgacccaagagactcaacttcaagctctttaacattcaagtcaaagaggtcacgcagaatgacggtacgacgacgattgccaataaccttaccagcacggttcaggtgtttactgactcggagtaccagctcccgtacgtcctcggctcggcgcatcaaggatgcctcccgccgtttccagcggacgtcttcatggtcccacagtatggatacctcaccctgaacaacgggagtcaggcggtaggacgctcttccttttactgcctggagtactttccttctcagatgctgcgtaccggaaacaactttaccttcagctacacctttgaggacgtgcctttccacagcagctacgctcacagccagagtttggaccggctgatgaatcctctgatcgaccagtatctgtattatctgaacaggacacaatcaaatagtggaactcttcagcagtctaggctactgtttagccaagctggacccaccagcatgtctcttcaagctaaaaactggctgcctggaccttgctacagacagcagcgtctgtcaaagcaggcaaacgacaacaacaacagcaactttccccggactgcggctacaaagtatcatctaaatggtcgggactcgttggttaatccaggaccagctatggccagccacaaagacgatgaagaaaagtttttccccatgcatggaaccctgatatttggtaaacaaggaacaaatgctaacgacgcggatttggaacatgtcatgattacagatgaagaagaaatcaggaccaccaatcccgtggctacagagcagtacggaaacgtgtcaaataatttgcaaaactcaaatactggtccaactacagaaaatgtcaatcaccagggagcgttacctggtatggtgtggcaggatcgagacgtgtacctgcagggacccatttgggccaagattcctcacaccgacggacactttcacccttctccactgatgggaggttttggactcaaacacccgcctcctcaaatcatgatcaaaaacactcctgttccagccaatcctcctacaaacttcagcgcggcaaagtttgcttccttcatcacacagtattccacgggacaggtcagcgtggagatcgagtgggagctgcagaaggagaacagcaaacgctggaaccccgagatccagtacacttccaactacaacaaatctgttaatgtggactttactgtggacactaatggtgtgtattcagagcctcgccccattggcaccagatacctgactcgtaatctgtaa

SEQ ID NO: 13073 - DNA, 2208 bp, Artificial Sequence
  source: /note="Description of Artificial Sequence: Synthetic polynucleotide"
atggctgccgatggttatcttccagattggctcgaggacactctctctgaaggaataagacagtggtggaagctcaaacctggcccaccaccaccaaagcccgcagagcggcatcaggacgacagcaggggtcttgtgcttcctgggtacaagtacctcggacccttcaacggactcgacaaaggagagccggtcaacgaggcagacgctgcggccctcgagcacgacaaggcctacgaccgacagctcgacagcggagacaacccgtacctcaagtacaaccacgccgacgcggagtttcaggagcgtcttaaagaagatacgtcttttgggggcaacctcggacgagcagtcttccaggcgaaaaagagggttcttgaacctctgggcctggttgaggaacctgttaagacggctccgggaaaaaagaggccggtagagcactctcctgcggagccagactcctcctcgggaaccggaaaagcgggccagcagcctgcaagaaagagattgaatttcggtcagactggagacgcagactccgtacctgacccccagcctctcggacagccaccagcagcccccacaagtttgggatctactacaatggctacaggcagtggcgcaccaatggcagacaataacgagggtgccgatggagtgggtaattcctcaggaaattggcattgcgattcccaatggctgggcgacagagtcatcaccaccagcacccgaacctgggccctgcccacctacaacaaccacctctacaagcaaatctccagccaatcaggagcatcgaacgacaaccactactttggctacagcaccccttgggggtattttgacttcaacagattccactgtcacttctccccacgtgactggcaaagactcatcaacaacaactggggattccgacccaagagactcaacttcaagctctttaacattcaagtcaaagaggtcacgcagaatgacggtacgacgacgattgccaataaccttaccagcacggttcaggtgtttactgactcggagtaccagctcccgtacgtcctcggctcggcgcatcaaggatgcctcccgccgtttccagcggacgtcttcatggtcccacagtatggatacctcaccctgaacaacgggagtcaggcggtaggacgctcttccttttactgcctggagtactttccttctcagatgctgcgtaccggaaacaactttaccttcagctacacctttgaggacgtgcctttccacagcagctacgctcacagccagagtttggaccggctgatgaatcctctgatcggccagtatctgtattatctgaacaggacacaatcaaatagtggaactcttcagcagtctaggctactgtttagccaagctggacccaccagcatgtctcttcaagctaaaaactggctgcctggaccttgctacagacagcagcgtctgtcaaagcaggcaaacgacaacaacaacagcaactttccctggactgcggctacaaagtatcatctaaatggtcgggactcgttggttaatccaggaccagctatggccagccacaaagacgatgaagaaaagtttttccccatgcatggaaccctgatatttggtaaacaaggaacaaatgctaacgacgcggatttggaacatgtcatgattacagatgaagaagaaatcaggaccaccaatcccgtggctacagagcagtacggaaacgtgtcaaataatttgcaaaactcaaatactggtccaactacagaaaatgtcaatcaccagggagcgttacctggtatggtgtggcaggatcgagacgtgtacctgcagggacccatttgggccaagattcctcacaccgacggacactttcacccttctccactgatgggaggttttggactcaaacacccgcctcctcaaatcatgatcaaaaacactcctgttccagccaatcctcctacaaacttcagcgcggcaaagtttgcttccttcatcacacagtattccacgggacaggtcagcgtggagatcgagtgggagctgcagaaggagaacagcaaacgctggaaccccgagatccagtacacttccaactacaacaaatctgttaatgtggactttactgtggacactaatggtgtgtattcagagcctcgccccattggcaccagatacctgactcgtaatctgtaa

SEQ ID NO: 13074 - DNA, 2208 bp, Artificial Sequence
  source: /note="Description of Artificial Sequence: Synthetic polynucleotide"
atggctgccgatggttatcttccagattggctcgaggacactctctctgaaggaataagacagtggtggaagctcaaacctggcccaccaccaccaaagcccgcagagcggcatcaggacgacagcaggggtcttgtgcttcctgggtacaagtacctcggacccttcaacggactcgacaaaggagagccggtcaacgaggcagacgctgcggccctcgagcacgacaaggcctacgaccggcagctcgacagcggagacaacccgtacctcaagtacaaccacgccgacgcggagtttcaggagcgtcttaaagaagatacgtcttttgggggcaacctcggacgagcagtcttccaggcgaaaaagagggttcttgaacctctgggcctggttgaggaacctgttaagacggctccgggaaaaaagaggccggtagagcactctcctgcggagccagactcctcctcgggaaccggaaaagcgggccagcagcctgcaagaaagagattgaatttcggtcagactggagacgcagactccgtacctgacccccagcctctcggacagccaccagcagcccccacaagtttgggatctactacaatggctacaggcagtggcgcaccaatggcagacaataacgagggtgccgatggagtgggtaattcctcaggaaattggcattgcgattcccaatggctgggcgacagagtcatcaccaccagcacccgaacctgggccctgcccacctacaacaaccacctctacaagcaaatctccagccaatcaggagcatcgaacgacaaccactactttggctacagcaccccttgggggtattttgacttcaacagattccactgtcacttctccccacgtgactggcaaagactcatcaacaacaactggggattccgacccaagagactcaacttcaagctctttaacattcaagtcaaagaggtcacgcagaatgacggtacgacgacgattgccaataaccttaccagcacggttcaggtgtttactgactcggagtaccagctcccgtacgtcctcggctcggcgcatcaaggatgcctcccgccgtttccagcggacgtcttcatggtcccacagtatggatacctcaccctgaacaacgggagtcaggcggtaggacgctcttccttttactgcctggagtactttccttctcagatgctgcgtaccggaaacaactttaccttcagctacacctttgaggacgtgcctttccacagcagctacgctcacagccagagtttggaccggctgatgaatcctctgatcgaccagtatctgtattatctgaacaggacacaatcaaatagtggaactcttcagcagtctaggctactgtttagccaagctggacccaccagcatgtctcttcaagctaaaaactggctgcctggaccttgctacagacagcagcgtctgtcaaagcaggcaaacgacaacaacaacagcaactttccctggactgcggctacaaagtatcatctaaatggtcgggactcgttggttaatccaggaccagctatggccagccacaaagacgatgaagaaaagtttttccccatgcatggaaccctgatatttggtaaacaaggaacaaatgctaacgacgcggatttggaacatgtcatgattacagatgaagaagaaatcaggaccaccaatcccgtggctacagagcagtacggaaacgtgtcaaataatttgcaaaactcaaatactggtccaactacagaaaatgtcaatcaccagggagcgttacctggtatggtgtggcaggatcgagacgtgtacctgcagggacccatttgggccaagattcctcacaccgacggacactttcacccttctccactgatgggaggttttggactcaaacacccgcctcctcaaatcatgatcaaaaacactcctgttccagccaatcctcctacaaacttcagcgcggcaaagtttgcttccttcatcacacagtattccacgggacaggtcggcgtggagatcgagtgggagctgcagaaggagaacagcaaacgctggaaccccgagatccagtacacttccaactacaacaaatctgttaatgtggactttactgtggacactaatggtgtgtattcagagcctcgccccattggcaccagatacctgactcgtaatctgtaa

SEQ ID NO: 13075 - DNA, 2208 bp, Artificial Sequence
  source: /note="Description of Artificial Sequence: Synthetic polynucleotide"
atggctgccgatggttatcttccagattggctcgaggacactctctctgaaggaataagacagtggtggaagctcaaacctggcccaccaccaccaaagcccgcagagcggcatcaggacgacagcaggggtcttgtgcttcctgggtacaagtacctcggacccttcaacggactcgacaaaggagagccggtcaacgaggcagacgctgcggccctcgagcacgacaaggcctacgaccggcagctcgacagcggagacaacccgtacctcaagtacaaccacgccgacgcggagtttcaggagcgtcttaaagaagatacgtcttttgggggcaacctcggacgagcagtcttccaggcgaaaaagagggttcttgaacctctgggcctggttgaggaacctgttaagacggctccgggaaaaaagaggccggtagagcactctcctgcggagccagactcctcctcgggaaccggaaaagcgggccagcagcctgcaagaaagagattgaatttcggtcagactggagacgcagactccgtacctgacccccagcctctcggacagccaccagcagcccccacaagtttgggatctactacaatggctacaggcagtggcgcaccaatggcagacaataacgagggtgccgatggagtgggtaattcctcaggaaattggcattgcgattcccaatggctgggcgacagagccatcaccaccagcacccgaacctgggccctgcccacctacaacaaccacctctacaagcaaatctccagccaatcaggagcatcgaacgacaaccactactttggctacagcaccccttgggggtattttgacttcaacagattccactgtcacttctccccacgtgactggcaaagactcatcaacaacaactggggattccgacccaagagactcaacttcaagctctttaacattcaagtcaaagaggtcacgcagaatgacggtacgacgacgattgccaataaccttaccagcacggttcaggtgtttactgactcggagtaccagctcccgtacgtcctcggctcggcgcatcaaggatgcctcccgccgtttccagcggacgtcttcatggtcccacagtatggatacctcaccctgaacaacgggagtcaggcggtaggacgctcttccttttactgcctggagtactttccttctcagatgctgcgtaccggaaacaactttaccttcagctacacctttgaggacgtgcctttccacagcagctacgctcacagccagagtttggaccggctgatgaatcctctgatcgaccagtatctgtattatctgaacaggacacaatcaaatagtggaactcttcagcagtctaggctactgtttagccaagctggacccaccagcatgtctcttcaagctaaaaactggctgcctggaccttgctacagacagcagcgtctgtcaaagcaggcaaacgacaacaacaacagcaactttccctggactgcggctacaaagtatcatctaaatggtcgggactcgttggttaatccaggaccagctatggccagccacaaagacgatgaagaaaagtttttccccatgcatggaaccctgatatttggtaaacaaggaacaaatgctaacgacgcggatttggaacatgtcatgattacagatgaagaagaaatcaggaccaccaatcccgtggctacagagcagtacggaaacgtgtcaaataatttgcaaaactcaaatactggtccaactacagaaaatgtcaatcaccagggagcgttacctggtatggtgtggcaggatcgagacgtgtacctgcagggacccatttgggccaagattcctcacaccgacggacactttcacccttctccactgatgggaggttttggactcaaacacccgcctcctcaaatcatgatcaaaaacactcctgttccagccaatcctcctacaaacttcagcgcggcaaagtttgcttccttcatcacacagtattccacgggacaggtcagcgtggagatcgagtgggagctgcagaaggagaacagcaaacgctggaaccccgagatccagtacacttccaactacaacaaatctgttaatgtggactttactgtggacactaatggtgtgtattcagagcctcgccccattggcaccagatacctgactcgtaatctgtaa

SEQ ID NO: 13076 - DNA, 2208 bp, Artificial Sequence
  source: /note="Description of Artificial Sequence: Synthetic polynucleotide"
atggctgccgatggttatcttccagattggctcgaggacactctctctgaaggaataagacagtggtggaagctcaaacctggcccaccaccaccaaagcccgcagagcggcatcaggacgacagcaggggtcttgtgcttcctgggtacaagtacctcggacccttcaacggactcgacaaaggagagccggtcaacgaggcagacgctgcggccctcgagcacgacaaggcctacgaccggcagctcgacagcggagacaacccgtacctcaagtacaaccacgccgacgcggagtttcaggagcgtcttaaagaagatacgtcttttgggggcaacctcggacgagcagtcttccaggcgaaaaagagggttcttgaacctctgggcctggttgaggaacctgttaagacggctccgggaaaaaagaggccggtagagcactctcctgcggagccagactcctcctcgggaaccggaaaagcgggccagcagcctgcaagaaagagattgaatttcggtcagactggagacgcaggctccgtacctgacccccagcctctcggacagccaccagcagcccccacaagtttgggatctactacaatggctacaggcagtggcgcaccaatggcagacaataacgagggtgccgatggagtgggtaattcctcaggaaattggcattgcgattcccaatggctgggcgacagagtcatcaccaccagcacccgaacctgggccctgcccacctacaacaaccacctctacaagcaaatctccagccaatcaggagcatcgaacgacaaccactactttggctacagcaccccttgggggtattttgacttcaacagattccactgtcacttctccccacgtgactggcaaagactcatcaacaacaactggggattccgacccaagagactcaacttcaagctctttaacattcaagtcaaagaggtcacgcagaatgacggtacgacgacgattgccaataaccttaccagcacggttcaggtgtttactgactcggagtaccagctcccgtacgtcctcggctcggcgcatcaaggatgcctcccgccgtttccagcggacgtcttcatggtcccacagtatggatacctcaccctgaacaacgggagtcaggcggtaggacgctcttccttttactgcctggagtactttccttctcagatgctgcgtaccggaaacaactttaccttcagctacacctttgaggacgtgcctttccacagcagctacgctcacagccagagtttggaccggctgatgaatcctctgatcgaccagtatctgtattatctgaacaggacacaatcaaatagtggaactcttcagcagtctaggctactgtttagccaagctggacccaccagcatgtctcttcaagctaaaaactggctgcctggaccttgctacagacagcagcgtctgtcaaagcaggcaaacgacaacaacaacagcaactttccctggactgcggctacaaagtatcatctaaatggtcgggactcgttggttaatccaggaccagctatggccagccacaaagacgatgaagaaaagtttttccccatgcatggaaccctgatatttggtaaacaaggaacaaatgctaacgacgcggatttggaacatgtcatgattacagatgaagaagaaatcaggaccaccaatcccgtggctacagagcagtacggaaacgtgtcaaataatttgcaaaactcaaatactggtccaactacagaaaatgtcaatcaccagggagcgttacctggtatggtgtggcaggatcgagacgtgtacctgcagggacccatttgggccaagattcctcacaccgacggacactttcacccttctccactgatgggaggttttggactcaaacacccgcctcctcaaatcatgatcaaaaacactcctgttccagccaatcctcctacaaacttcagcgcggcaaagtttgcttccttcatcacacagtattccacgggacaggtcagcgtggagatcgagtgggagctgcagaaggagaacagcaaacgctggaaccccgagatccagtacacttccaactacaacaaatctgttaatgtggactttactgtggacactaatggtgtgtattcagagcctcgccccattggcaccagatacctgactcgtaatctgtaa

SEQ ID NO: 13077 - DNA, 2208 bp, Artificial Sequence
  source: /note="Description of Artificial Sequence: Synthetic polynucleotide"
atggctgccgatggttatcttccagattggctcgaggacactctctctgaaggaataagacagtggtggaagctcaaacctggcccaccaccaccaaagcccgcagagcggcatcaggacgacagcaggggtcttgtgcttcctgggtacaagtacctcggacccttcaacggactcgacaaaggagagccggtcaacgaggcagacgctgcggccctcgagcacgacaaggcctacgaccggcagctcgacagcggagacagcccgtacctcaagtacaaccacgccgacgcggagtttcaggagcgtcttaaagaagatacgtcttttgggggcaacctcggacgagcagtcttccaggcgaaaaagagggttcttgaacctctgggcctggttgaggaacctgttaagacggctccgggaaaaaagaggccggtagagcactctcctgcggagccagactcctcctcgggaaccggaaaagcgggccagcagcctgcaagaaagagattgaatttcggtcagactggagacgcagactccgtacctgacccccagcctctcggacagccaccagcagcccccacaagtttgggatctactacaatggctacaggcagtggcgcaccaatggcagacaataacgagggtgccgatggagtgggtaattcctcaggaaattggcattgcgattcccaatggctgggcgacagagtcatcaccaccagcacccgaacctgggccctgcccacctacaacaaccacctctacaagcaaatctccagccaatcaggagcatcgaacgacaaccactactttggctacagcaccccttgggggtattttgacttcaacagattccactgtcacttctccccacgtgactggcaaagactcatcaacaacaactggggattccgacccaagagactcaacttcaagctctttaacattcaagtcaaagaggtcacgcagaatgacggtacgacgacgattgccaataaccttaccagcacggttcaggtgtttactgactcggagtaccagctcccgtacgtcctcggctcggcgcatcaaggatgcctcccgccgtttccagcggacgtcttcatggtcccacagtatggatacctcaccctgaacaacgggagtcaggcggtaggacgctcttccttttactgcctggagtactttccttctcagatgctgcgtaccggaaacaactttaccttcagctacacctttgaggacgtgcctttccacagcagctacgctcacagccagagtttggaccggctgatgaatcctctgatcgaccagtatctgtattatctgaacaggacacaatcaaatagtggaactcttcagcagtctaggctactgtttagccaagctggacccaccagcatgtctcttcaagctaaaaactggctgcctggaccttgctacagacagcagcgtctgtcaaagcaggcaaacgacaacaacaacagcaactttccctggactgcggctacaaagtatcatctaaatggtcgggactcgttggttaatccaggaccagctatggccagccacaaagacgatgaagaaaagtttttccccatgcatggaaccctgatatttggtaaacaaggaacaaatgctaacgacgcggatttggaacatgtcatgattacagatgaagaagaaatcaggaccaccaatcccgtggctacagagcagtacggaaacgtgtcaaataatttgcaaaactcaaatactggtccaactacagaaaatgtcaatcaccagggagcgttacctggtatggtgtggcaggatcgagacgtgtacctgcagggacccatttgggccaagattcctcacaccgacggacactttcacccttctccactgatgggaggttttggactcaaacacccgcctcctcaaatcatgatcaaaaacactcctgttccagccaatcctcctacaaacttcagcgcggcaaagtttgcttccttcatcacacagtattccacgggacaggtcagcgtggagatcgagtgggagctgcagaaggagaacagcaaacgctggaaccccgagatccagtacacttccaactacaacaaatctgttaatgtggactttactgtggacactaatggtgtgtattcagagcctcgccccattggcaccagatacctgactcgtaatctgtaa

SEQ ID NO: 13078 - DNA, 2208 bp, Artificial Sequence
  source: /note="Description of Artificial Sequence: Synthetic polynucleotide"
atggctgccgatggttatcttccagattggctcgaggacactctctctgaaggaataagacagtggtggaagctcaaacctggcccaccaccaccaaagcccgcagagcggcatcaggacgacagcaggggtcttgtgcttcctgggtacaagtacctcggacccttcaacggactcgacaaaggagagccggtcaacgaggcagacgctgcggccctcgagcacgacaaggcctacgaccggcagctcgacagcggagacaacccgtacctcaagtacaaccacgccgacgcggagtttcaggagcgtcttaaagaagatacgtcttttgggggcaacctcggacgagcagtcttccaggcgaaaaagagggttcttgaacctctgggcctggttgaggaacctgttaagacggctccgggaaaaaagaggccggtagagcactctcctgcggagccagactcctcctcgggaaccggaaaagcgggccagcagcctgcaagaaagagattgaatttcggtcagactggagacgcagactccgtacctgacccccagcctctcggacagccaccagcagcccccacaagtttgggatctactacaatggctacaggcagtggcgcaccaatggcagacaataacgagggtgccgatggagtgggtaattcctcaggaaattggcattgcgattcccaatggctgggcgacagagtcatcaccaccagcacccgaacctgggccctgcccacctacaacaaccacctctacaagcaaatctccagccaatcaggagcatcgaacgacaaccactactttggctacagcaccccttgggggtattttgacttcaacagattccactgtcacttctccccacgtgactggcaaagactcatcaacaacaactggggattccgacccaagagactcaacttcaagctctttaacattcaagtcaaagaggtcacgcagaatgacggtacgacgacgattgccaataaccttaccagcacggttcaggtgtttactgactcggagtaccagctcccgtacgtcctcggctcggcgcatcaaggatgcctcccgccgtttccagcggacgtcttcatggtcccacagtatggatacctcaccctgaacaacgggagtcaggcggtaggacgctcttccttttactgcctggagtactttccttctcagatgctgcgtaccggaaacaactttaccttcagctacacctttgaggacgtgcctttccacagcagctacgctcacagccagagtttggaccggctgatgaatcctctgatcgaccagtatctgtattatctgaacaggacacaatcaaatagtggaactcttcagcagtctaggctactgtttagccaagctggacccaccagcatgtctcttcaagctaaaaactggctgcctggaccttgctacagacagcagcgtctgtcaaagcaggcaaacgacaacaacaacagcaactttccctggactgcggctacaaagtatcatctaaatggtcgggactcgttggttaatccaggaccagctatggccagccacaaagacgatgaagaaaagtttttccccatgcatggaaccctgatatttggtaaacaaggaacaaatgctaacgacgcggatttggaacatgtcatgattacagatgaagaagaaatcaggaccaccaatcccgtggctacagagcagtacggaaacgtgtcaaataatttgcaaaactcaaatactggtccaactacagaaaatgtcaatcaccagggagcgttacctggtatggtgtggcaggatcgagacgtgtacctgcagggacccatttgggccaagattcctcacaccgacggacactttcacccttctccactgatgggaggttttggactcaaacacccgcctcctcaaatcatgatcaaaaacactcctgttccagccaatcctcctacaaacttcagcgcggcaaagtttgcttccttcatcacacagtattccacgggacaggtcagcgtggagatcgagtgggagctgcagaaggagaacagcaaacgctggaaccccgagatccagtacacttccaactacaacaaatctgttaatgtggactttactgtggacactaatggtgtgtattcagagcctcgccccattggcaccagatacctgactcgtaatccgtaa

SEQ ID NO: 13079 - DNA, 2208 bp, Artificial Sequence
  source: /note="Description of Artificial Sequence: Synthetic polynucleotide"
atggctgccgatggttatcttccagattggctcgaggacactctctctgaaggaataagacagtggtggaagctcaaacctggcccaccaccaccaaagcccgcagagcggcatcaggacgacagcaggggtcttgtgcttcctgggtacaagtacctcggacccttcaacggactcgacaaaggagagccggtcaacgaggcagacgctgcggccctcgagcacgacaaggcctacgaccggcagctcgacagcggagacaacccgtacctcaagtacaaccacgccgacgcggagtttcaggagcgtcttaaagaagatacgtcttttgggggcaacctcggacgagcagtcttccaggcgaaaaagagggttcttgaacctctgggcctggttgaggaacctgttaagacggctccgggaaaaaagaggccggtagagcactctcctgcggagccagactcctcctcgggaaccggaaaagcgggccagcagcctgcaagaaagagattgaatttcggtcagactggagacgcagactccgtacctgacccccagcctctcggacagccaccagcagcccccacaagtttgggatctactacaatggctacaggcagtggcgcaccaatggcagacaataacgagggtgccgatggagtgggtaattcctcaggaaattggcattgcgattcccaatggctgggcgacagagtcatcaccaccagcacccgaacctgggccctgcccacctacaacaaccacctctacaagcaaatctccagccaatcaggagcatcgaacgacaaccactactttggctacagcaccccttgggggtattttgacttcaacagattccactgtcacttctccccacgtgactggcaaagactcatcaacaacaactggggattccgacccaagagactcaacttcaagctctttaacattcaagtcaaagaggtcacgcagaatgacggtacgacgacgattgccaataaccttaccagcacggttcaggtgtttactgactcggagtaccagctcccgtacgtcctcggctcggcgcatcaaggatgcctcccgccgtttccagcggacgtcttcatggtcccacagtatggatacctcaccctgaacaacgggagtcaggcggtaggacgctcttccttttactgcctggagtactttccttctcagatgctgcgtaccggaaacaactttaccttcagctacacctttgaggacgtgcctttccacagcagctacgctcacagccagagtttggaccggctgatgaatcctctgatcgaccagtatctgtattatctgaacaggacacaatcaaatagtggaactcttcagcagtctaggctactgtttagccaagctggacccaccagcatgtctcttcaagctaaaaactggctgcctggaccttgctacagacagcagcgtccgtcaaagcaggcaaacgacaacaacaacagcaactttccctggactgcggctacaaagtatcatctaaatggtcgggactcgttggttaatccaggaccagctatggccagccacaaagacgatgaagaaaagtttttccccatgcatggaaccctgatatttggtaaacaaggaacaaatgctaacgacgcggatttggaacatgtcatgattacagatgaagaagaaatcaggaccaccaatcccgtggctacagagcagtacggaaacgtgtcaaataatttgcaaaactcaaatactggtccaactacagaaaatgtcaatcaccagggagcgttacctggtatggtgtggcaggatcgagacgtgtacctgcagggacccatttgggccaagattcctcacaccgacggacactttcacccttctccactgatgggaggttttggactcaaacacccgcctcctcaaatcatgatcaaaaacactcctgttccagccaatcctcctacaaacttcagcgcggcaaagtttgcttccttcatcacacagtattccacgggacaggtcagcgtggagatcgagtgggagctgcagaaggagaacagcaaacgctggaaccccgagatccagtacacttccaactacaacaaatctgttaatgtggactttactgtggacactaatggtgtgtattcagagcctcgccccattggcaccagatacctgactcgtaatctgtaa

SEQ ID NO: 13080 - DNA, 2208 bp, Artificial Sequence
  source: /note="Description of Artificial Sequence: Synthetic polynucleotide"
atggctgccgatggttatcttccagattggctcgaggacactctctctgaaggaataagacagtggtggaagctcaaacctggcccaccaccaccaaagcccgcagagcggcatcaggacgacagcaggggtcttgtgcttcctgggtacaagtacctcggacccttcaacggactcgacaaaggagagccggtcaacgaggcagacgctgcggccctcgagcacgacaaggcctacgaccggcagctcgacagcggagacaacccgtacctcaagtacaaccacgccgacgcggagtttcaggagcgtcttaaagaagatacgtcttttgggggcaacctcggacgagcagtcttccaggcgaaaaagagggttcttgaacctctgggcctggttgaggaacctgttaagacggctccgggaaaaaagaggccggtagagcactctcctgcggagccagactcctcctcgggaaccggaaaagcgggccagcagcctgcaagaaagagattgaatttcagtcagactggagacgcagactccgtacctgacccccagcctctcggacagccaccagcagcccccacaagtttgggatctactacaatggctacaggcagtggcgcaccaatggcagacaataacgagggtgccgatggagtgggtaattcctcaggaaattggcattgcgattcccaatggctgggcgacagagtcatcaccaccagcacccgaacctgggccctgcccacctacaacaaccacctctacaagcaaatctccagccaatcaggagcatcgaacgacaaccactactttggctacagcaccccttgggggtattttgacttcaacagattccactgtcacttctccccacgtgactggcaaagactcatcaacaacaactggggattccgacccaagagactcaacttcaagctctttaacattcaagtcaaagaggtcacgcagaatgacggtacgacgacgattgccaataaccttaccagcacggttcaggtgtttactgactcggagtaccagctcccgtacgtcctcggctcggcgcatcaaggatgcctcccgccgtttccagcggacgtcttcatggtcccacagtatggatacctcaccctgaacaacgggagtcaggcggtaggacgctcttccttttactgcctggagtactttccttctcagatgctgcgtaccggaaacaactttaccttcagctacacctttgaggacgtgcctttccacagcagctacgctcacagccagagtttggaccggctgatgaatcctctgatcgaccagtatctgtattatctgaacaggacacaatcaaatagtggaactcttcagcagtctaggctactgtttagccaagctggacccaccagcatgtctcttcaagctaaaaactggctgcctggaccttgctacagacagcagcgtctgtcaaagcaggcaaacgacaacaacaacagcaactttccctggactgcggctacaaagtatcatctaaatggtcgggactcgttggttaatccaggaccagctatggccagccacaaagacgatgaagaaaagtttttccccatgcatggaaccctgatatttggtaaacaaggaacaaatgctaacgacgcggatttggaacatgtcatgattacagatgaagaagaaatcaggaccaccaatcccgtggctacagagcagtacggaaacgtgtcaaataatttgcaaaactcaaatactggtccaactacagaaaatgtcaatcaccagggagcgttacctggtatggtgtggcaggatcgagacgtgtacctgcagggacccatttgggccaagattcctcacaccgacggacactttcacccttctccactgatgggaggttttggactcaaacacccgcctcctcaaatcatgatcaaaaacactcctgttccagccaatcctcctacaaacttcagcgcggcaaagtttgcttccttcatcacacagtattccacgggacaggtcagcgtggagatcgagtgggagctgcagaaggagaacagcaaacgctggaaccccgagatccagtacacttccaactacaacaaatctgttaatgtggactttactgtggacactaatggtgtgtattcagagcctcgccccattggcaccagatacctgactcgtaatctgtaa

SEQ ID NO: 13081 - DNA, 2208 bp, Artificial Sequence
  source: /note="Description of Artificial Sequence: Synthetic polynucleotide"
atggctgccgatggttatcttccagattggctcgaggacactctctctgaaggaataagacagtggtggaagctcaaacctggcccaccaccaccaaagcccgcagagcggcatcaggacgacagcaggggtcttgtgcttcctgggtacaagtacctcggacccttcaacggactcgacaaaggagagccggtcaacgaggcagacgctgcggccctcgagcacgacaaggcctacgaccggcagctcgacagcggagacaacccgtacctcaagtacaaccacgccgacgcggagtttcaggagcgtcttaaagaagatacgtcttttgggggcaacctcggacgagcagtcttccaggcgaaaaagagggttcttgaacctctgggcctggttgaggaacctgttaagacggctccgggaaaaaagaggccggtagagcactctcctgcggagccagactcctcctcgggaaccggaaaagcgggccagcagcctgcaagaaagagattgaatttcggtcagactggagacgcagactccgtacctgacccccagcctctcggacagccaccagcagcccccacaagtttgggatctactacaatggctacaggcagtggcgcaccaatggcagacaataacgagggtgccgatggagtgggtaattcctcaggaaattggcattgcgattcccaatggctgggcgacagagtcatcaccaccagcacccgaacctgggccctgcccacctacaacaaccacctctacaagcaaatctccagccaatcaggagcatcgaacgacaaccactactttggctacagcaccccttgggggtattttgacttcaacagattccactgtcacttctccccacgtgactggcaaagactcatcaacaacaactggggattccgacccaagagactcaacttcaagctctttaacattcaagtcaaagaggtcacgcagaatgacggtacgacgacgattgccaataaccttaccagcacggttcaggtgtttactgactcggagtaccagctcccgtacgtcctcggctcggcgcatcaaggatgcctcccgccgtttccagcggacgtcttcatggtcccacagtatggatacctcaccctgaacaacgggagtcaggcggtaggacgctcttccttttactgcctggagtactttccttctcagatgctgcgtaccggaaacaactttaccttcagctacacctttgaggacgtgcctttccacagcagctacgctcacagccagagtttggaccggctgatgaatcctctgatcgaccagtatctgtattatctgaacaggacacaatcaaatagtggaactcttcagcagtctaggctactgtttagccaagctggacccaccagcatgtctcttcaagctaaaaactggctgcctggaccttgctacagacagcagcgtctgtcaaagcaggcaaacgacaacaacaacagcaactttccctggactgcggctacaaagtatcatctaaatggtcgggactcgttggttaatccaggaccagctatggccagccacaaagacgatgaagaaaagtttttccccatgcatggaaccctgatatttggtaaacaaggaacaaatgctaacgacgcggatttggaacatgtcatgattacagatgaagaagaaatcaggaccaccaatcccgtggctacagagcagtacggaaacgtgtcaaataatttgcaaaactcaaatactggtccaactacagaaaatgtcaatcaccagggagcgttacctggtatggtgtggcaggatcgagacgtgtacctgcagggacccatttgggccaagattcctcacaccgacggacactttcacccttctccactgatgggaggttttggactcaaacacccgcctcctcaaatcatgatcaaaaacactcctgttccagccaatcctcctacaaacttcagcgcggcaaagtttgcttccttcatcacacagtattccacgggacaggtcagcgtggagatcgagtgggagccgcagaaggagaacagcaaacgctggaaccccgagatccagtacacttccaactacaacaaatctgttaatgtggactttactgtggacactaatggtgtgtattcagagcctcgccccattggcaccagatacctgactcgtaatctgtaa

SEQ ID NO: 13082 - DNA, 2208 bp, Artificial Sequence
  source: /note="Description of Artificial Sequence: Synthetic polynucleotide"
atggctgccgatggttatcttccagattggctcgaggacactctctctgaaggaataagacagtggtggaagctcaaacctggcccaccaccaccaaagcccgcagagcggcatcaggacgacagcaggggtcttgtgcttcctgggtacaagtacctcggacccttcaacggactcgacaaaggagagccggtcaacgaggcagacgctgcggccctcgagcacgacaaggcctacgaccggcagctcgacagcggagacaacccgtacctcaagtacaaccacgccgacgcggagtttcaggagcgtcttaaagaagatacgtcttttgggggcaacctcggacgagcagtcttccaggcgaaaaagagggttcttgaacctctgggcctggttgaggaacctgttaagacggctccgggaaaaaagaggccggtagagcactctcctgcggagccagactcctcctcgggaaccggaaaagcgggccagcagcctgcaagaaagagattgaatttcggtcagactggagacgcagactccgtacctgacccccagcctctcggacagccaccagcagcccccacaagtttgggatctactacaatggctacaggcagtggcgcaccaatggcagacaataacgagggtgccgatggagtgggtaattcctcaggaaattggcattgcgattcccaatggctgggcgacagagtcatcaccaccagcacccgaacctgggccctgcccacctacaacaaccacctctacaagcaaatctccagccaatcaggagcatcgaacgacaaccactactttggctacagcaccccttgggggtattttgacttcaacagattccactgtcacttctccccacgtgactggcaaagactcatcaacaacaactggggattccgacccaagagacccaacttcaagctctttaacattcaagtcaaagaggtcacgcagaatgacggtacgacgacgattgccaataaccttaccagcacggttcaggtgtttactgactcggagtaccagctcccgtacgtcctcggctcggcgcatcaaggatgcctcccgccgtttccagcggacgtcttcatggtcccacagtatggatacctcaccctgaacaacgggagtcaggcggtaggacgctcttccttttactgcctggagtactttccttctcagatgctgcgtaccggaaacaactttaccttcagctacacctttgaggacgtgcctttccacagcagctacgctcacagccagagtttggaccggctgatgaatcctctgatcgaccagtatctgtattatctgaacaggacacaatcaaatagtggaactcttcagcagtctaggctactgtttagccaagctggacccaccagcatgtctcttcaagctaaaaactggctgcctggaccttgctacagacagcagcgtctgtcaaagcaggcaaacgacaacaacaacagcaactttccctggactgcggctacaaagtatcatctaaatggtcgggactcgttggttaatccaggaccagctatggccagccacaaagacgatgaagaaaagtttttccccatgcatggaaccctgatatttggtaaacaaggaacaaatgctaacgacgcggatttggaacatgtcatgattacagatgaagaagaaatcaggaccaccaatcccgtggctacagagcagtacggaaacgtgtcaaataatttgcaaaactcaaatactggtccaactacagaaaatgtcaatcaccagggagcgttacctggtatggtgtggcaggatcgagacgtgtacctgcagggacccatttgggccaagattcctcacaccgacggacactttcacccttctccactgatgggaggttttggactcaaacacccgcctcctcaaatcatgatcaaaaacactcctgttccagccaatcctcctacaaacttcagcgcggcaaagtttgcttccttcatcacacagtattccacgggacaggtcagcgtggagatcgagtgggagctgcagaaggagaacagcaaacgctggaaccccgagatccagtacacttccaactacaacaaatctgttaatgtggactttactgtggacactaatggtgtgtattcagagcctcgccccattggcaccagatacctgactcgtaatctgtaa

SEQ ID NO: 13083 - DNA, 2208 bp, Artificial Sequence
  source: /note="Description of Artificial Sequence: Synthetic polynucleotide"
atggctgccgatggttatcttccagattggctcgaggacactctctctgaaggaataagacagtggtggaagctcaaacctggcccaccaccaccaaagcccgcagagcggcatcaggacgacagcaggggtcttgtgcttcctgggtacaagtacctcggacccttcaacggactcgacaaaggagagccggtcaacgaggcagacgctgcggccctcgagcacgacaaggcctacgaccggcagctcgacagcggagacaacccgtacctcaagtacaaccacgccgacgcggagtttcaggagcgtcttaaagaagatacgtcttttgggggcaacctcggacgagcagtcttccaggcgaaaaagagggttcttgaacctctgggcctggttgaggaacctgttaagacggctccgggaaaaaagaggccggtagagcactctcctgcggagccagactcctcctcgggaaccggaaaagcgggccagcagcctgcaagaaagagattgaatttcggtcagactggagacgcagactccgtacctgacccccagcctctcggacagccaccagcagcccccacaagtttgggatctactacaatggctacaggcagtggcgcaccaatggcagacaataacgagggtgccgatggagtgggtaattcctcaggaaattggcattgcgattcccaatggctgggcgacagagtcatcaccaccagcacccgaacctgggccctgcccacctacaacaaccacctctacaagcaaatctccagccaatcaggagcatcgaacgacaaccactactttggctacagcaccccttgggggtattttgacttcaacagattccactgtcacttctccccacgtgactggcaaagactcatcaacaacaactggggattccgacccaagagactcaacttcaagctctttaacattcaagtcaaagaggtcacgcagaatgacggtacgacgacgattgccaataaccttaccagcacggttcaggtgtttactgactcggagtaccagctcccgtacgtcctcggctcggcgcatcaaggatgcctcccgccgtttccagcggacgtcttcatggtcccacagtatggatacctcaccctgaacaacgggagtcaggcggtaggacgctcttccttttactgcctggagtactttccttctcagatgctgcgtaccggaaacaactttaccttcagctacacctttgaggacgtgcctttccacagcagctacgctcacagccagagtttggaccggctgatgaatcctctgatcgaccagtatctgtattatctgaacaggacacaatcaaatagtggaactcttcagcagtctaggctactgtttagccaagctggacccaccagcatgtctcttcaagctaaaaactggctgcctggaccttgctacagacagcagcgtctgtcaaagcaggcaaacgacaacaacaacagcaactttccctggactgcggctacaaagtatcatctaaatggtcgggactcgttggttaatccaggaccagctatggccagccacaaagacgatgaagaaaagtttttccccatgcatggaaccctgatatttggtaaacaaggaacaaatgctaacgacgcggatttggaacatgtcgtgattacagatgaagaagaaatcaggaccaccaatcccgtggctacagagcagtacggaaacgtgtcaaataatttgcaaaactcaaatactggtccaactacagaaaatgtcaatcaccagggagcgttacctggtatggtgtggcaggatcgagacgtgtacctgcagggacccatttgggccaagattcctcacaccgacggacactttcacccttctccactgatgggaggttttggactcaaacacccgcctcctcaaatcatgatcaaaaacactcctgttccagccaatcctcctacaaacttcagcgcggcaaagtttgcttccttcatcacacagtattccacgggacaggtcagcgtggagatcgagtgggagctgcagaaggagaacagcaaacgctggaaccccgagatccagtacacttccaactacaacaaatctgttaatgtggactttactgtggacactaatggtgtgtattcagagcctcgccccattggcaccagatacctgactcgtaatctgtaa

SEQ ID NO: 13084 - DNA, 2208 bp, Artificial Sequence
  source: /note="Description of Artificial Sequence: Synthetic polynucleotide"
atggctgccgatggttatcttccagattggctcgaggacactctctctgaaggaataagacagtggtggaagctcaaacctggcccaccaccaccaaagcccgcagagcggcatcaggacgacagcaggggtcttgtgcttcctgggtacaagtacctcggacccttcaacggactcgacaaaggagagccggtcaacgaggcagacgctgcggccctcgagcacgacaaggcctacgaccggcagctcgacagcggagacaacccgtacctcaagtacaaccacgccgacgcggagtttcaggagcgtcttaaagaagatacgtcttttgggggcaacctcggacgagcagtcttccaggcgaaaaagagggttcttgaacctctgggcctggttgaggaacctgttaagacggctccgggaaaaaagaggccggtagagcactctcctgcggagccagactcctcctcgggaaccggaaaagcgggccagcagcctgcaagaaagagattgaatttcggtcagactggagacgcagactccgtacctgacccccagcctctcggacagccaccagcagcccccacaagtttgggatctactacaatggctacaggcagtggcgcaccaatggcagacaataacgagggtgccgatggagtgggtaattcctcaggaaattggcattgcgattcccaatggctgggcgacagagtcatcaccaccagcacccgaacctgggccctgcccacctacaacaaccacctctacaagcaaatctccagccaatcaggagcatcgaacgacaaccactactttggctacagcaccccttgggggtattttgacttcaacagattccactgtcacttctccccacgtgactggcaaagactcatcaacaacaactggggattccgacccaagagactcaacttcaagctctttaacattcaagtcaaagaggtcacgcagaatgacggtacgacgacgattgccaataaccttaccagcacggttcaggtgtttactgactcggagtaccagctcccgtacgtcctcggctcggcgcatcaaggatgcctcccgccgtttccagcggacgtcttcatggtcccacagtatggatacctcaccctgaacaacgggagtcaggcggtaggacgctcttccttttactgcctggagtactttccttctcagatgctgcgtaccggaaacaactttaccttcagctacacctttgaggacgtgcctttccacagcagctacgctcacagccagagtttggaccggctgatgaatcctctgatcgaccagtatctgtattatctgaacaggacacaatcaaatagtggaactcttcagcagtctaggctactgtttagccaagctggacccaccagcatgtctcttcaagctaaaaactggctgcctggaccttgctacagacagcagcgtctgtcaaagcaggcaaacgacaacaacaacagcaactttccctggactgcggctacaaagtatcatctaaatggtcgggactcgttggttaatccaggaccagctatggccagccacaaagacgatgaagaaaagtttttccccatgcatggaaccctgatatttggtaaacaaggaacaaatgctaacgacgcggatttggaacatgtcatgattacagatgaagaagaaatcaggaccaccaatcccgtggctacagagcagtacggaaacgtgtcaaataatttgcaaaactcaaatactggtccaactacagaaaatgtcaatcaccagggagcgttacctggtatggtgtggcgggatcgagacgtgtacctgcagggacccatttgggccaagattcctcacaccgacggacactttcacccttctccactgatgggaggttttggactcaaacacccgcctcctcaaatcatgatcaaaaacactcctgttccagccaatcctcctacaaacttcagcgcggcaaagtttgcttccttcatcacacagtattccacgggacaggtcagcgtggagatcgagtgggagctgcagaaggagaacagcaaacgctggaaccccgagatccagtacacttccaactacaacaaatctgttaatgtggactttactgtggacactaatggtgtgtattcagagcctcgccccattggcaccagatacctgactcgtaatctgtaa

SEQ ID NO: 13085 - DNA, 2208 bp, Artificial Sequence
  source: /note="Description of Artificial Sequence: Synthetic polynucleotide"
atggctgccgatggttatcttccagattggctcgaggacactctctctgaaggaataagacagtggtggaagctcaaacctggcccaccaccaccaaagcccgcagagcggcatcaggacgacagcaggggtcttgtgcttcctgggtacaagtacctcggacccttcaacggactcgacaaaggagagccggtcaacgaggcagacgctgcggccctcgagcacgacaaggcctacgaccggcagctcgacagcggagacaacccgtacctcaagtacaaccacgccgacgcggagtttcaggagcgtcttaaagaagatacgtcttttgggggcaacctcggacgagcagtcttccaggcgaaaaagagggttcttgaacctctgggcctggttgaggaacctgttaagacggctccgggaaaaaagaggccggtagagcactctcctgcggagccagactcctcctcgggaaccggaaaagcgggccagcagcctgcaagaaagagattgaatttcggtcagactggaggcgcagactccgtacctgacccccagcctctcggacagccaccagcagcccccacaagtttgggatctactacaatggctacaggcagtggcgcaccaatggcagacaataacgagggtgccgatggagtgggtaattcctcaggaaattggcattgcgattcccaatggctgggcgacagagtcatcaccaccagcacccgaacctgggccctgcccacctacaacaaccacctctacaagcaaatctccagccaatcaggagcatcgaacgacaaccactactttggctacagcaccccttgggggtattttgacttcaacagattccactgtcacttctccccacgtgactggcaaagactcatcaacaacaactggggattccgacccaagagactcaacttcaagctctttaacattcaagtcaaagaggtcacgcagaatgacggtacgacgacgattgccaataaccttaccagcacggttcaggtgtttactgactcggagtaccagctcccgtacgtcctcggctcggcgcatcaaggatgcctcccgccgtttccagcggacgtcttcatggtcccacagtatggatacctcaccctgaacaacgggagtcaggcggtaggacgctcttccttttactgcctggagtactttccttctcagatgctgcgtaccggaaacaactttaccttcagctacacctttgaggacgtgcctttccacagcagctacgctcacagccagagtttggaccggctgatgaatcctctgatcgaccagtatctgtattatctgaacaggacacaatcaaatagtggaactcttcagcagtctaggctactgtttagccaagctggacccaccagcatgtctcttcaagctaaaaactggctgcctggaccttgctacagacagcagcgtctgtcaaagcaggcaaacgacaacaacaacagcaactttccctggactgcggctacaaagtatcatctaaatggtcgggactcgttggttaatccaggaccagctatggccagccacaaagacgatgaagaaaagtttttccccatgcatggaaccctgatatttggtaaacaaggaacaaatgctaacgacgcggatttggaacatgtcatgattacagatgaagaagaaatcaggaccaccaatcccgtggctacagagcagtacggaaacgtgtcaaataatttgcaaaactcaaatactggtccaactacagaaaatgtcaatcaccagggagcgttacctggtatggtgtggcaggatcgagacgtgtacctgcagggacccatttgggccaagattcctcacaccgacggacactttcacccttctccactgatgggaggttttggactcaaacacccgcctcctcaaatcatgatcaaaaacactcctgttccagccaatcctcctacaaacttcagcgcggcaaagtttgcttccttcatcacacagtattccacgggacaggtcagcgtggagatcgagtgggagctgcagaaggagaacagcaaacgctggaaccccgagatccagtacacttccaactacaacaaatctgttaatgtggactttactgtggacactaatggtgtgtattcagagcctcgccccattggcaccagatacctgactcgtaatctgtaa

SEQ ID NO: 13086 - DNA, 2208 bp, Artificial Sequence
  source: /note="Description of Artificial Sequence: Synthetic polynucleotide"
atggctgccgatggttatcttccagattggctcgaggacactctctctgaaggaataagacagtggtggaagctcaaacctggcccaccaccaccaaagcccgcagagcggcatcaggacgacagcaggggtcttgtgcttcctgggtacaagtacctcggacccttcaacggactcgacaaaggagagccggtcaacgaggcagacgctgcggccctcgagcacgacaaggcctacgaccggcagctcgacagcggagacaacccgtacctcaagtacaaccacgccgacgcggagtttcaggagcgtcttaaagaagatacgtcttttgggggcaacctcggacgagcagtcttccaggcgaaaaagagggttcttgaacctctgggcctggttgaggaacctgttaagacggctccgggaaaaaagaggccggtagagcactctcctgcggagccagactcctcctcgggaaccggaaaagcgggccagcagcctgcaagaaagagattgaatttcggtcagactggagacgcagactccgtacctgacccccagcctctcggacagccaccagcagcccccacaagtttgggatctactacaatggctacaggcagtggcgcaccaatggcagacaataacgagggtaccgatggagtgggtaattcctcaggaaattggcattgcgattcccaatggctgggcgacagagtcatcaccaccagcacccgaacctgggccctgcccacctacaacaaccacctctacaagcaaatctccagccaatcaggagcatcgaacgacaaccactactttggctacagcaccccttgggggtattttgacttcaacagattccactgtcacttctccccacgtgactggcaaagactcatcaacaacaactggggattccgacccaagagactcaacttcaagctctttaacattcaagtcaaagaggtcacgcagaatgacggtacgacgacgattgccaataaccttaccagcacggttcaggtgtttactgactcggagtaccagctcccgtacgtcctcggctcggcgcatcaaggatgcctcccgccgtttccagcggacgtcttcatggtcccacagtatggatacctcaccctgaacaacgggagtcaggcggtaggacgctcttccttttactgcctggagtactttccttctcagatgctgcgtaccggaaacaactttaccttcagctacacctttgaggacgtgcctttccacagcagctacgctcacagccagagtttggaccggctgatgaatcctctgatcgaccagtatctgtattatctgaacaggacacaatcaaatagtggaactcttcagcagtctaggctactgtttagccaagctggacccaccagcatgtctcttcaagctaaaaactggctgcctggaccttgctacagacagcagcgtctgtcaaagcaggcaaacgacaacaacaacagcaactttccctggactgcggctacaaagtatcatctaaatggtcgggactcgttggttaatccaggaccagctatggccagccacaaagacgatgaagaaaagtttttccccatgcatggaaccctgatatttggtaaacaaggaacaaatgctaacgacgcggatttggaacatgtcatgattacagatgaagaagaaatcaggaccaccaatcccgtggctacagagcagtacggaaacgtgtcaaataatttgcaaaactcaaatactggtccaactacagaaaatgtcaatcaccagggagcgttacctggtatggtgtggcaggatcgagacgtgtacctgcagggacccatttgggccaagattcctcacaccgacggacactttcacccttctccactgatgggaggttttggactcaaacacccgcctcctcaaatcatgatcaaaaacactcctgttccagccaatcctcctacaaacttcagcgcggcaaagtttgcttccttcatcacacagtattccacgggacaggtcagcgtggagatcgagtgggagctgcagaaggagaacagcaaacgctggaaccccgagatccagtacacttccaactacaacaaatctgttaatgtggactttactgtggacactaatggtgtgtattcagagcctcgccccattggcaccagatacctgactcgtaatctgtaa

SEQ ID NO: 13087 - DNA, 2208 bp, Artificial Sequence
  source: /note="Description of Artificial Sequence: Synthetic polynucleotide"
atggctgccgatggttatcttccagattggctcgaggacactctctctgaaggaataagacagtggtggaagctcaaacctggcccaccaccaccaaagcccgcagagcggcatcaggacgacagcaggggtcttgtgcttcctgggtacaagtacctcggacccttcaacggactcgacaaaggagagccggtcaacgaggcagacgctgcggccctcgagcacgacaaggcctacgaccggcagctcgacagcggagacaacccgtaccccaagtacaaccacgccgacgcggagtttcaggagcgtcttaaagaagatacgtcttttgggggcaacctcggacgagcagtcttccaggcgaaaaagagggttcttgaacctctgggcctggttgaggaacctgttaagacggctccgggaaaaaagaggccggtagagcactctcctgcggagccagactcctcctcgggaaccggaaaagcgggccagcagcctgcaagaaagagattgaatttcggtcagactggagacgcagactccgtacctgacccccagcctctcggacagccaccagcagcccccacaagtttgggatctactacaatggctacaggcagtggcgcaccaatggcagacaataacgagggtgccgatggagtgggtaattcctcaggaaattggcattgcgattcccaatggctgggcgacagagtcatcaccaccagcacccgaacctgggccctgcccacctacaacaaccacctctacaagcaaatctccagccaatcaggagcatcgaacgacaaccactactttggctacagcaccccttgggggtattttgacttcaacagattccactgtcacttctccccacgtgactggcaaagactcatcaacaacaactggggattccgacccaagagactcaacttcaagctctttaacattcaagtcaaagaggtcacgcagaatgacggtacgacgacgattgccaataaccttaccagcacggttcaggtgtttactgactcggagtaccagctcccgtacgtcctcggctcggcgcatcaaggatgcctcccgccgtttccagcggacgtcttcatggtcccacagtatggatacctcaccctgaacaacgggagtcaggcggtaggacgctcttccttttactgcctggagtactttccttctcagatgctgcgtaccggaaacaactttaccttcagctacacctttgaggacgtgcctttccacagcagctacgctcacagccagagtttggaccggctgatgaatcctctgatcgaccagtatctgtattatctgaacaggacacaatcaaatagtggaactcttcagcagtctaggctactgtttagccaagctggacccaccagcatgtctcttcaagctaaaaactggctgcctggaccttgctacagacagcagcgtctgtcaaagcaggcaaacgacaacaacaacagcaactttccctggactgcggctacaaagtatcatctaaatggtcgggactcgttggttaatccaggaccagctatggccagccacaaagacgatgaagaaaagtttttccccatgcatggaaccctgatatttggtaaacaaggaacaaatgctaacgacgcggatttggaacatgtcatgattacagatgaagaagaaatcaggaccaccaatcccgtggctacagagcagtacggaaacgtgtcaaataatttgcaaaactcaaatactggtccaactacagaaaatgtcaatcaccagggagcgttacctggtatggtgtggcaggatcgagacgtgtacctgcagggacccatttgggccaagattcctcacaccgacggacactttcacccttctccactgatgggaggttttggactcaaacacccgcctcctcaaatcatgatcaaaaacactcctgttccagccaatcctcctacaaacttcagcgcggcaaagtttgcttccttcatcacacagtattccacgggacaggtcagcgtggagatcgagtgggagctgcagaaggagaacagcaaacgctggaaccccgagatccagtacacttccaactacaacaaatctgttaatgtggactttactgtggacactaatggtgtgtattcagagcctcgccccattggcaccagatacctgactcgtaatctgtaa

SEQ ID NO: 13088 - DNA, 2208 bp, Artificial Sequence
  source: /note="Description of Artificial Sequence: Synthetic polynucleotide"
atggctgccgatggttatcttccagattggctcgaggacactctctctgaaggaataagacagtggtggaagctcaaacctggcccaccaccaccaaagcccgcagagcggcatcaggacgacagcaggggtcttgtgcttcctgggtacaagtacctcggacccttcaacggactcgacaaaggagagccggtcaacgaggcagacgctgcggccctcgagcacgacaaggcctacgaccggcagctcgacagcggagacaacccgtacctcaagtacaaccacgccgacgcggagtttcaggagcgtcttaaagaagatacgtcttttgggggcaacctcggacgagcagtcttccaggcgaaaaagagggttcttgaacctctgggcctggttgaggaacctgttaagacggctccgggaaaaaagaggccggtagagcactctcctgcggagccagactcctcctcgggaaccggaaaagcgggccagcagcctgcaagaaagagattgaatttcggtcagactggagacgcagactccgtacctgacccccagcctctcggacagccaccagcagcccccacaagtttgggatctactacaatggctacaggcagtggcgcaccaatggcagacaataacgagggtgccgatggagtgggtaattcctcaggaaattggcattgcgattcccaatggctgggcgacagagtcatcaccaccagcacccgaacctgggccctgcccacctacaacaaccacctctacaagcaaatctccagccaatcaggagcatcgaacgacaaccactactttggctacagcaccccttgggggtattttgacttcaacagattccactgtcacttctccccacgtgactggcaaagactcatcaacaacaactggggattccgacccaagagactcaacttcaagctctttaacattcaagtcaaagaggtcacgcagaatgacggtacgacgacgattgccaataaccttaccagcacggttcaggtgtttactgactcggagtaccagctcccgtacgtcctcggctcggcgcatcaaggatgcctcccgccgtttccagcggacgtcttcatggtcccacagtatggatacctcaccctgaacaacgggagtcaggcggtaggacgctcttccttttactgcctggagtactttccttctcagatgctgcgtaccggaaacaactttaccttcagctacacctttgaggacgtgcctttccacagcagctacgctcacagccagagtttggaccggctgatgaatcctctgatcgaccagtatctgtattatctgaacaggacacaatcaaatagtggaactcttcagcagtctaggctactgtttagccaagctggacccaccagcatgtctcttcaagctaaaaactggctgcctggaccttgctacagacagcagcgtctgtcaaagcaggcaaacgacaacaacaacagcaactttccctggactgcggctacaaagtatcatctaaatggtcgggactcgttggttaatccaggaccagctatggccagccacaaagacgatgaagaaaagtttttccccatgcatggaaccctgatatttggtaaacaaggaacaaatgctaacgacgcggatttggaacatgtcatgattacagatgaagaagaaatcagggccaccaatcccgtggctacagagcagtacggaaacgtgtcaaataatttgcaaaactcaaatactggtccaactacagaaaatgtcaatcaccagggagcgttacctggtatggtgtggcaggatcgagacgtgtacctgcagggacccatttgggccaagattcctcacaccgacggacactttcacccttctccactgatgggaggttttggactcaaacacccgcctcctcaaatcatgatcaaaaacactcctgttccagccaatcctcctacaaacttcagcgcggcaaagtttgcttccttcatcacacagtattccacgggacaggtcagcgtggagatcgagtgggagctgcagaaggagaacagcaaacgctggaaccccgagatccagtacacttccaactacaacaaatctgttaatgtggactttactgtggacactaatggtgtgtattcagagcctcgccccattggcaccagatacctgactcgtaatctgtaa

SEQ ID NO: 13089 - DNA, 2208 bp, Artificial Sequence
  source: /note="Description of Artificial Sequence: Synthetic polynucleotide"
atggctgccgatggttatcttccagattggctcgaggacactctctctgaaggaataagacagtggtggaagctcaaacctggcccaccaccaccaaagcccgcagagcggcatcaggacgacagcaggggtcttgtgcttcctgggtacaagtacctcggacccttcaacggactcgacaaaggagagccggtcaacgaggcagacgctgcggccctcgagcacgacaaggcctacgaccggcagctcgacagcggagacaacccgtacctcaagtacaaccacgccgacgcggagtttcaggagcgtcttaaagaagatacgtcttttgggggcaacctcggacgagcagtcttccaggcgaaaaagagggttcttgaacctctgggcctggttgaggaacctgttaagacggctccgggaaaaaagaggccggtagagcactctcctgcggagccagactcctcctcgggaaccggaaaagcgggccagcagcctgcaagaaagagattgaatttcggtcagactggagacgcagactccgtacctgacccccagcctctcggacagccaccagcagcccccacaagtttgggatctactacaatggctacaggcagtggcgcaccaatggcagacaataacgagggtgccgatggagtgggtaattcctcaggaaattggcattgcgattcccaatggctgggcgacagagtcatcaccaccagcacccgaacctgggccctgcccacctacaacaaccacctctacaagcaaatctccagccaatcaggagcatcgaacgacaaccactactttggctacagcaccccttgggggtattttgacttcaacagattccactgtcgcttctccccacgtgactggcaaagactcatcaacaacaactggggattccgacccaagagactcaacttcaagctctttaacattcaagtcaaagaggtcacgcagaatgacggtacgacgacgattgccaataaccttaccagcacggttcaggtgtttactgactcggagtaccagctcccgtacgtcctcggctcggcgcatcaaggatgcctcccgccgtttccagcggacgtcttcatggtcccacagtatggatacctcaccctgaacaacgggagtcaggcggtaggacgctcttccttttactgcctggagtactttccttctcagatgctgcgtaccggaaacaactttaccttcagctacacctttgaggacgtgcctttccacagcagctacgctcacagccagagtttggaccggctgatgaatcctctgatcgaccagtatctgtattatctgaacaggacacaatcaaatagtggaactcttcagcagtctaggctactgtttagccaagctggacccaccagcatgtctcttcaagctaaaaactggctgcctggaccttgctacagacagcagcgtctgtcaaagcaggcaaacgacaacaacaacagcaactttccctggactgcggctacaaagtatcatctaaatggtcgggactcgttggttaatccaggaccagctatggccagccacaaagacgatgaagaaaagtttttccccatgcatggaaccctgatatttggtaaacaaggaacgaatgctaacgacgcggatttggaacatgtcatgattacagatgaagaagaaatcaggaccaccaatcccgtggctacagagcagtacggaaacgtgtcaaataatttgcaaaactcaaatactggtccaactacagaaaatgtcaatcaccagggagcgttacctggtatggtgtggcaggatcgagacgtgtacctgcagggacccatttgggccaagattcctcacaccgacggacactttcacccttctccactgatgggaggttttggactcaaacacccgcctcctcaaatcatgatcaaaaacactcctgttccagccaatcctcctacaaacttcagcgcggcaaagtttgcttccttcatcacacagtattccacgggacaggtcagcgtggagatcgagtgggagctgcagaaggagaacagcaaacgctggaaccccgagatccagtacacttccaactacaacaaatctgttaatgtggactttactgtggacactaatggtgtgtattcagagcctcgccccattggcaccagatacctgactcgtaatctgtaa

SEQ ID NO: 13090 - DNA, 2208 bp, Artificial Sequence
  source: /note="Description of Artificial Sequence: Synthetic polynucleotide"
atggctgccgatggttatcttccagattggctcgaggacactctctctgaaggaataagacagtggtggaagctcaaacctggcccaccaccaccaaagcccgcagagcggcatcaggacgacagcaggggtcttgtgcttcctgggtacaagtacctcggacccttcaacggactcgacaaaggagagccggtcaacgaggcagacgctgcggccctcgagcacgacaaggcctacgaccggcagctcgacagcggagacaacccgtacctcaagtacaaccacgccgacgcggagtttcaggagcgtcttaaagaagatacgtcttttgggggcaacctcggacgagcagtcttccaggcgaaaaagagggttcttgaacctctgggcctggttgaggaacctgttaagacggctccgggaaaaaagaggccggtagagcactctcctgcggagccagactcctcctcgggaaccggaaaagcgggccagcagcctgcaagaaagagattgaatttcggtcagactggagacgcagactccgtacctgacccccagcctctcggacagccaccagcagcccccacaagtttgggatctactacaatggctacaggcagtggcgcaccaatggcagacaataacgagggtgccgatggagtgggtaattcctcaggaaattggcattgcgattcccaatggctgggcgacagagtcatcaccaccagcacccgaacctgggccctgcccacctacaacaaccacctctacaagcaaatctccagccaatcaggagcatcgaacgacaaccactactttggctacagcaccccttgggggtattttgacttcaacagattccactgtcacttctccccacgtgactggcaaagactcatcaacaacaactggggattccgacccaagagactcaacttcaagctctttaacattcaagtcaaagaggtcacgcagaatgacggtacgacgacgattgccaataaccttaccagcacggttcaggtgtttactgactcggagtaccagctcccgtacgtcctcggctcggcgcatcaaggatgcctcccgccgtttccagcggacgtcttcatggtcccacagtatggatacctcaccctgaacaacgggagtcaggcggtaggacgctcttccttttactgcctggagtactttccttctcagatgctgcgtaccggaaacaactttaccttcagctacacctttgaggacgtgcctttccgcagcagctacgctcacagccagagtttggaccggctgatgaatcctctgatcgaccagtatctgtattatctgaacaggacacaatcaaatagtggaactcttcagcagtctaggctactgtttagccaagctggacccaccagcatgtctcttcaagctaaaaactggctgcctggaccttgctacagacagcagcgtctgtcaaagcaggcaaacgacaacaacaacagcaactttccctggactgcggctacaaagtatcatctaaatggtcgggactcgttggttaatccaggaccagctatggccagccacaaagacgatgaagaaaagtttttccccatgcatggaaccctgatatttggtaaacaaggaacaaatgctaacgacgcggatttggaacatgtcatgattacagatgaagaagaaatcaggaccaccaatcccgtggctacagagcagtacggaaacgtgtcaaataatttgcaaaactcaaatactggtccaactacagaaaatgtcaatcaccagggagcgttacctggtatggtgtggcaggatcgagacgtgtacctgcagggacccatttgggccaagattcctcacaccgacggacactttcacccttctccactgatgggaggttttggactcaaacacccgcctcctcaaatcatgatcaaaaacactcctgttccagccaatcctcctacaaacttcagcgcggcaaagtttgcttccttcatcacacagtattccacgggacaggtcagcgtggagatcgagtgggagctgcagaaggagaacagcaaacgctggaaccccgagatccagtacacttccaactacaacaaatctgttaatgtggactttactgtggacactaatggtgtgtattcagagcctcgccccattggcaccagatacctgactcgtaatctgtaa

SEQ ID NO: 13091 - DNA, 2208 bp, Artificial Sequence
  source: /note="Description of Artificial Sequence: Synthetic polynucleotide"
atggctgccgatggttatcttccagattggctcgaggacactctctctgaaggaataagacagtggtggaagctcaaacctggcccaccaccaccaaagcccgcagagcggcatcaggacgacagcaggggtcttgtgcttcctgggtacaagtacctcggacccttcaacggactcgacaaaggagagccggtcaacgaggcagacgctgcggccctcgagcacgacaaggcctacgaccggcagctcgacagcggagacaacccgtacctcaagtacaaccacgccgacgcggagtttcaggagcgtcttaaagaagatacgtcttttgggggcaacctcggacgagcagtcttccaggcgaaaaagagggttcttgaacctctgggcctggttgaggaacctgttaagacggctccgggaaaaaagaggccggtagagcactctcctgcggagccagactcctcctcgggaaccggaaaagcgggccagcagcctgcaagaaagagattgaatttcggtcagactggagacgcagactccgtacctgacccccagcctctcggacagccaccagcagcccccacaagtttgggatctactacaatggctacaggcagtggcgcaccaatggcagacaataacgagggtgccgatggagtgggtaattcctcaggaaattggcattgcgattcccaatggctgggcgacagagtcatcaccaccagcacccgaacctgggccctgcccacctacagcaaccacctctacaagcaaatctccagccaatcaggagcatcgaacgacaaccactactttggctacagcaccccttgggggtattttgacttcaacagattccactgtcacttctccccacgtgactggcaaagactcatcaacaacaactggggattccgacccaagagactcaacttcaagctctttaacattcaagtcaaagaggtcacgcagaatgacggtacgacgacgattgccaataaccttaccagcacggttcaggtgtttactgactcggagtaccagctcccgtacgtcctcggctcggcgcatcaaggatgcctcccgccgtttccagcggacgtcttcatggtcccacagtatggatacctcaccctgaacaacgggagtcaggcggtaggacgctcttccttttactgcctggagtactttccttctcagatgctgcgtaccggaaacaactttaccttcagctacacctttgaggacgtgcctttccacagcagctacgctcacagccagagtttggaccggctgatgaatcctctgatcgaccagtatctgtattatctgaacaggacacaatcaaatagtggaactcttcagcagtctaggctactgtttagccaagctggacccaccagcatgtctcttcaagctaaaaactggctgcctggaccttgctacagacagcagcgtctgtcaaagcaggcaaacgacaacaacaacagcaactttccctggactgcggctacaaagtatcatctaaatggtcgggactcgttggttaatccaggaccagctatggccagccacaaagacgatgaagaaaagtttttccccatgcatggaaccctgatatttggtaaacaaggaacaaatgctaacgacgcggatttggaacatgtcatgattacagatgaagaagaaatcaggaccaccaatcccgtggctacagagcagtacggaaacgtgtcaaataatttgcaaaactcaaatactggtccaactacagaaaatgtcaatcaccagggagcgttacctggtatggtgtggcaggatcgagacgtgtacctgcagggacccatttgggccaagattcctcacaccgacggacactttcacccttctccactgatgggaggttttggactcaaacacccgcctcctcaaatcatgatcaaaaacactcctgttccagccaatcctcctacaaacttcagcgcggcaaagtttgcttccttcatcacacagtattccacgggacaggtcagcgtggagatcgagtgggagctgcagaaggagaacagcaaacgctggaaccccgagatccagtacacttccaactacaacaaatctgttaatgtggactttactgtggacactaatggtgtgtattcagagcctcgccccattggcaccagatacctgactcgtaatctgtaa

SEQ ID NO: 13092 - DNA, 2208 bp, Artificial Sequence
  source: /note="Description of Artificial Sequence: Synthetic polynucleotide"
atggctgccgatggttatcttccagattggctcgaggacactctctctgaaggaataagacagtggtggaagctcaaacctggcccaccaccaccaaagcccgcagagcggcatcaggacgacagcaggggtcttgtgcttcctgggtacaagtacctcggacccttcaacggactcgacaaaggagagccggtcaacgaggcagacgctgcggccctcgagcacgacaaggcctacgaccggcagctcgacagcggagacaacccgtacctcaagtacaaccacgccgacgcggagtttcaggagcgtcttaaagaagatacgtcttttgggggcaacctcggacgagcagtcttccaggcgaaaaagagggttcttgaacctctgggcctggttgaggaacctgttaagacggctccgggaaaaaagaggccggtagagcactctcctgcggagccagactcctcctcgggaaccggaaaagcgggccagcagcctgcaagaaagagattgaatttcggtcagactggagacgcagactccgtacctgacccccagcctctcggacagccaccagcagcccccacaagtttgggatctactacaatggctacaggcagtggcgcaccaatggcagacaataacgagggtgccgatggagtgggtaattcctcaggaaattggcattgcgattcccaatggctgggcgacagagtcatcaccaccagcacccgaacctgggccctgcccacctacaacaaccacctctacaagcaaatctccagccaatcaggagcatcgaacgacaaccactactttggctacagcaccccttgggggtattttgacttcaacagattccactgtcacttctccccacgtgactggcaaagactcatcaacaacaactggggattccgacccaagagactcaacttcaagccctttaacattcaagtcaaagaggtcacgcagaatgacggtacgacgacgattgccaataaccttaccagcacggttcaggtgtttactgactcggagtaccagctcccgtacgtcctcggctcggcgcatcaaggatgcctcccgccgtttccagcggacgtcttcatggtcccacagtatggatacctcaccctgaacaacgggagtcaggcggtaggacgctcttccttttactgcctggagtactttccttctcagatgctgcgtaccggaaacaactttaccttcagctacacctttgaggacgtgcctttccacagcagctacgctcacagccagagtttggaccggctgatgaatcctctgatcgaccagtatctgtattatctgaacaggacacaatcaaatagtggaactcttcagcagtctaggctactgtttagccaagctggacccaccagcatgtctcttcaagctaaaaactggctgcctggaccttgctacagacagcagcgtctgtcaaagcaggcaaacgacaacaacaacagcaactttccctggactgcggctacaaagtatcatctaaatggtcgggactcgttggttaatccaggaccagctatggccagccacaaagacgatgaagaaaagtttttccccatgcatggaaccctgatatttggtaaacaaggaacaaatgctaacgacgcggatttggaacatgtcatgattacagatgaagaagaaatcaggaccaccaatcccgtggctacagagcagtacggaaacgtgtcaaataatttgcaaaactcaaatactggtccaactacagaaaatgtcaatcaccagggagcgttacctggtatggtgtggcaggatcgagacgtgtacctgcagggacccatttgggccaagattcctcacaccgacggacactttcacccttctccactgatgggaggttttggactcaaacacccgcctcctcaaatcatgatcaaaaacactcctgttccagccaatcctcctacaaacttcagcgcggcaaagtttgcttccttcatcacacagtattccacgggacaggtcagcgtggagatcgagtgggagctgcagaaggagaacagcaaacgctggaaccccgagatccagtacacttccaactacaacaaatctgttaatgtggactttactgtggacactaatggtgtgtattcagagcctcgccccattggcaccagatacctgactcgtaatctgtaa

SEQ ID NO: 13093 - DNA, 2208 bp, Artificial Sequence
  source: /note="Description of Artificial Sequence: Synthetic polynucleotide"
atggctgccgatggttatcttccagattggctcgaggacactctctctgaaggaataagacagtggtggaagctcaaacctggcccaccaccaccaaagcccgcagagcggcatcaggacgacagcaggggtcttgtgcttcctgggtacaagtacctcggacccttcaacggactcgacaaaggagagccggtcaacgaggcagacgctgcggccctcgagcacgacaaggcctacgaccggcagctcgacagcggagacaacccgtacctcaagtacaaccacgccgacgcggagtttcaggagcgtcttaaagaagatacgtcttttgggggcaacctcggacgagcagtcttccaggcgaaaaagagggttcttgaacctctgggcctggttgaggaacctgttaagacggctccgggaaaaaagaggccggtagagcactctcctgcggagccagactcctcctcgggaaccggaaaagcgggccagcagcctgcaagaaagagattgaatttcggtcagactggagacgcagactccgtacctgacccccagcctctcggacagccaccagcagcccccacaagtttgggatctactacaatggctacaggcagtggcgcaccaatggcagacaataacgagggtgccgatggagtgggtaattcctcaggaaattggcattgcgattcccaatggctgggcgacagagtcatcaccaccagcacccgaacctgggccctgcccacctacaacaaccacctctacaagcaaatctccagccaatcaggagcatcgaacggcaaccactactttggctacagcaccccttgggggtattttgacttcaacagattccactgtcacttctccccacgtgactggcaaagactcatcaacaacaactggggattccgacccaagagactcaacttcaagctctttaacattcaagtcaaagaggtcacgcagaatgacggtacgacgacgattgccaataaccttaccagcacggttcaggtgtttactgactcggagtaccagctcccgtacgtcctcggctcggcgcatcaaggatgcctcccgccgtttccagcggacgtcttcatggtcccacagtatggatacctcaccctgaacaacgggagtcaggcggtaggacgctcttccttttactgcctggagtactttccttctcagatgctgcgtaccggaaacaactttaccttcagctacacctttgaggacgtgcctttccacagcagctacgctcacagccagagtttggaccggctgatgaatcctctgatcgaccagtatctgtattatctgaacaggacacaatcaaatagtggaactcttcagcagtctaggctactgtttagccaagctggacccaccagcatgtctcttcaagctaaaaactggctgcctggaccttgctacagacagcagcgtctgtcaaagcaggcaaacgacaacaacaacagcaactttccctggactgcggctacaaagtatcatctaaatggtcgggactcgttggttaatccaggaccagctatggccagccacaaagacgatgaagaaaagtttttccccatgcatggaaccctgatatttggtaaacaaggaacaaatgctaacgacgcggatttggaacatgtcatgattacagatgaagaagaaatcaggaccaccaatcccgtggctacagagcagtacggaaacgtgtcaaataatttgcaaaactcaaatactggtccaactacagaaaatgtcaatcaccagggagcgttacctggtatggtgtggcaggatcgagacgtgtacctgcagggacccatttgggccaagattcctcacaccgacggacactttcacccttctccactgatgggaggttttggactcaaacacccgcctcctcaaatcatgatcaaaaacactcctgttccagccaatcctcctacaaacttcagcgcggcaaagtttgcttccttcatcacacagtattccacgggacaggtcagcgtggagatcgagtgggagctgcagaaggagaacagcaaacgctggaaccccgagatccagtacacttccaactacaacaaatctgttaatgtggactttactgtggacactaatggtgtgtattcagagcctcgccccattggcaccagatacctgactcgtaatctgtaa

SEQ ID NO: 13094 - DNA, 2208 bp, Artificial Sequence
  source: /note="Description of Artificial Sequence: Synthetic polynucleotide"
atggctgccgatggttatcttccagattggctcgaggacactctctctgaaggaataagacagtggtggaagctcaaacctggcccaccaccaccaaagcccgcagagcggcatcaggacgacagcaggggtcttgtgcttcctgggtacaagtacctcggacccttcaacggactcgacaaaggagagccggtcaacgaggcagacgctgcggccctcgagcacgacaaggcctacgaccggcagctcgacagcggagacaacccgtacctcaagtacaaccacgccgacgcggagtttcaggagcgtcttaaagaagatacgtcttttgggggcaacctcggacgagcagtcttccaggcgaaaaagagggttcttgaacctctgggcctggttgaggaacctgttaagacggctccgggaaaaaagaggccggtagagcactctcctgcggagccagactcctcctcgggaaccggaaaagcgggccagcagcctgcaagaaagagattgaatttcggtcagactggagacgcagactccgtacctgacccccagcctctcggacagccaccagcagcccccacaagtttgggatctactacaatggctacaggcagtggcgcaccaatggcagacaataacgagggtgccgatggagtgggtaattcctcaggaaattggcattgcgattcccaatggctgggcgacagagtcatcaccaccagcacccgaacctgggccctgcccacctacaacaaccacctctacaagcaaatctccagccaatcaggagcatcgaacgacaaccactactttggctacagcaccccttgggggtattttgacttcaacagattccactgtcacttctccccacgtgactggcaaagactcatcaacaacaactggggattccgacccaagagactcaacttcaagctctttaacattcaagtcaaagaggtcacgcagaatgacggtacgacgacgattgccaataaccttaccagcacggttcaggtgtttactgactcggagtaccagctcccgtacgtcctcggctcggcgcatcaaggatgcctcccgccgtttccagcggacgtcttcatggtcccacagtatggatacctcaccctgaacaacgggagtcaggcggtaggacgctcttccttttactgcctggagtactttccttctcagatgctgcgtaccggaaacaactttaccttcagctacacctttgaggacgtgcctttccacagcagctacgctcacagccagagtttggaccggctgatgaatcctctgatcgaccagtatctgtattatctgaacaggacacaatcaaatagtggaactcttcagcagtctaggctactgtttagccaagctggacccaccagcatgtctcttcaagctaaaaactggctgcctggaccttgctacagacagcagcgtctgtcaaagcaggcaaacgacaacaacaacagcaactttccctggactgcggctacaaagtatcatctaaatggtcgggactcgttggttaatccaggaccagctatggccagccacaaagacgatgaagaaaagtttttccccatgcatggaaccctgatatttggtaaacaaggaacaaatgctaacgacgcggatttggaacatgtcatgattacagatgaagaagaaatcaggaccgccaatcccgtggctacagagcagtacggaaacgtgtcaaataatttgcaaaactcaaatactggtccaactacagaaaatgtcaatcaccagggagcgttacctggtatggtgtggcaggatcgagacgtgtacctgcagggacccatttgggccaagattcctcacaccgacggacactttcacccttctccactgatgggaggttttggactcaaacacccgcctcctcaaatcatgatcaaaaacactcctgttccagccaatcctcctacaaacttcagcgcggcaaagtttgcttccttcatcacacagtattccacgggacaggtcagcgtggagatcgagtgggagctgcagaaggagaacagcaaacgctggaaccccgagatccagtacacttccaactacaacaaatctgttaatgtggactttactgtggacactaatggtgtgtattcagagcctcgccccattggcaccagatacctgactcgtaatctgtaa

SEQ ID NO: 13095 - DNA, 2208 bp, Artificial Sequence
  source: /note="Description of Artificial Sequence: Synthetic polynucleotide"
atggctgccgatggttatcttccagattggctcgaggacactctctctgaaggaataagacagtggtggaagctcaaacctggcccaccaccaccaaagcccgcagagcggcatcaggacgacagcaggggtcttgtgcttcctgggtacaagtacctcggacccttcaacggactcgacaaaggagagccggtcaacgaggcagacgctgcggccctcgagcacgacaaggcctacgaccggcagctcgacagcggagacaacccgtacctcaagtacaaccacgccgacgcggagtttcaggagcgtcttaaagaagatacgtcttttgggggcaacctcggacgagcagtcttccaggcgaaaaagagggttcttgaacctctgggcctggttgaggaacctgttaagacggctccgggaaaaaagaggccggtagagcactctcctgcggagccagactcctcctcgggaaccggaaaagcgggccagcagcctgcaagaaagagattgaatttcggtcagactggagacgcagactccgtacctgacccccagcctctcggacagccaccagcagcccccacaagtttgggatctactacaatggctacaggcagtggcgcaccaatggcagacaataacgagggtgccgatggagtgggtaattcctcaggaaattggcattgcgattcccaatggctgggcgacagagtcatcaccaccagcacccgaacctgggccctgcccacctacaacaaccacctctacaagcaaatctccagccaatcaggagcatcgaacgacaaccactactttggctacagcaccccttgggggtattttgacttcaacagattccactgtcacttctccccacgtgactggcaaagactcatcaacaacaactggggattccgacccaagagactcaacttcaagctctttaacattcaagtcaaagaggtcacgcagaatgacggtacgacgacgattgccaataaccttaccagcacggttcaggtgtttactgactcggagtaccagctcccgtacgtcctcggctcggcgcatcaaggatgcctcccgccgtttccagcggacgtcttcatggtcccacagtatggatacctcaccctgaacaacgggagtcaggcggtaggacgctcttccttttactgcctggagtactttccttctcagatgctgcgtaccggaaacaactttaccttcagctacacctttgagggcgtgcctttccacagcagctacgctcacagccagagtttggaccggctgatgaatcctctgatcgaccagtatctgtattatctgaacaggacacaatcaaatagtggaactcttcagcagtctaggctactgtttagccaagctggacccaccagcatgtctcttcaagctaaaaactggctgcctggaccttgctacagacagcagcgtctgtcaaagcaggcaaacgacaacaacaacagcaactttccctggactgcggctacaaagtatcatctaaatggtcgggactcgttggttaatccaggaccagctatggccagccacaaagacgatgaagaaaagtttttccccatgcatggaaccctgatatttggtaaacaaggaacaaatgctaacgacgcggatttggaacatgtcatgattacagatgaagaagaaatcaggaccaccaatcccgtggctacagagcagtacggaaacgtgtcaaataatttgcaaaactcaaatactggtccaactacagaaaatgtcaatcaccagggagcgttacctggtatggtgtggcaggatcgagacgtgtacctgcagggacccatttgggccaagattcctcacaccgacggacactttcacccttctccactgatgggaggttttggactcaaacacccgcctcctcaaatcatgatcaaaaacactcctgttccagccaatcctcctacaaacttcagcgcggcaaagtttgcttccttcatcacacagtattccacgggacaggtcagcgtggagatcgagtgggagctgcagaaggagaacagcaaacgctggaaccccgagatccagtacacttccaactacaacaaatctgttaatgtggactttactgtggacactaatggtgtgtattcagagcctcgccccattggcaccagatacctgactcgtaatctgtaa

SEQ ID NO: 13096 - DNA, 2208 bp, Artificial Sequence
  source: /note="Description of Artificial Sequence: Synthetic polynucleotide"
atggctgccgatggttatcttccagattggctcgaggacactctctctgaaggaataagacagtggtggaagctcaaacctggcccaccaccaccaaagcccgcagagcggcatcaggacgacagcaggggtcttgtgcttcctgggtacaagtacctcggacccttcaacggactcgacaaaggagagccggtcaacgaggcagacgctgcggccctcgagcacgacaaggcctacgaccggcagctcgacagcggagacaacccgtacctcaagtacaaccacgccgacgcggagtttcaggagcgtcttaaagaagatacgtcttttgggggcaacctcggacgagcagtcttccaggcgaaaaagagggttcttgaacctctgggcctggttgaggaacctgttaagacggctccgggaaaaaagaggccggtagagcactctcctgcggagccagactcctcctcgggaaccggaaaagcgggccagcagcctgcaagaaagagattgaatttcggtcagactggagacgcagactccgtacctgacccccagcctctcggacagccaccagcagcccccacaagtttgggatctactacaatggctacaggcagtggcgcaccaatggcagacaataacgagggtgccgatggagtgggtaattcctcaggaaattggcattgcgattcccaatggctgggcgacagagtcatcaccaccagcacccgaacctgggccctgcccacctacaacaaccacctctacaagcaaatctccagccaatcaggagcatcgaacgacaaccactactttggctacagcaccccttgggggtattttgacttcaacagattccactgtcacttctccccacgtgactggcaaagactcatcaacaacaactggggattccgacccaagagactcaacttcaagctctttaacattcaagtcaaagaggtcacgcagaatgacggtacgacgacgattgccaataaccttaccagcacggttcaggtgtttactgactcggagtaccagctcccgtacgtcctcggctcggcgcatcaaggatgcctcccgccgtttccagcggacgtcttcatggtcccacagtatggatacctcaccctgaacaacgggagtcaggcggtaggacgctcttccttttactgcctggagtactttccttctcagatgctgcgtaccggaaacaactttaccttcagctacacctttgaggacgtgcctttccacagcagctacgctcacagccagagtttggaccggctgatgaatcctctgatcgaccagtatctgtattatctgaacaggacacaatcaaatagtggaactcttcagcagtctaggctactgtttagccaagctggacccaccagcatgtctcttcaagctaaaaactggctgcctggaccttgctacagacagcagcgtctgtcaaagcaggcaaacgacaacaacaacagcaactttccctggactgcggctacaaagtatcatctaaatggtcgggactcgttggttaatccaggaccagctatggccagccacaaagacgatgaagaaaagtttttccccatgcatggaaccctgatatttggtaaacaaggaacaaatgctaacgacgcggatttggaacatgtcatgattacagatgaagaagaaatcaggaccaccaatcccgtggctacagagcagtacggaaacgtgtcaaataatttgcaaaactcaaatactggtccaactacagaaaatgtcaatcaccagggagcgttacctggtatggtgtggcaggatcgagacgtgtacctgcagggacccatttgggccaagattcctcacaccgacggacactttcacccttctccactgatgggaggttttggactcaaacacccgcctcctcaaatcatgatcaaaaacactcctgttccagccaatcctcctacaaacttcagcgcggcaaagtttgcttccttcatcacacagtattccacgggacaggtcagcgtggagatcgagtgggagctgcagaaggagaacagcaaacgctggaaccccgagatccagtacacttccaactacagcaaatctgttaatgtggactttactgtggacactaatggtgtgtattcagagcctcgccccattggcaccagatacctgactcgtaatctgtaa

SEQ ID NO: 13097 - DNA, 2208 bp, Artificial Sequence
  source: /note="Description of Artificial Sequence: Synthetic polynucleotide"
atggctgccgatggttatcttccagattggctcgaggacactctctctgaaggaataagacagtggtggaggctcaaacctggcccaccaccaccaaagcccgcagagcggcatcaggacgacagcaggggtcttgtgcttcctgggtacaagtacctcggacccttcaacggactcgacaaaggagagccggtcaacgaggcagacgctgcggccctcgagcacgacaaggcctacgaccggcagctcgacagcggagacaacccgtacctcaagtacaaccacgccgacgcggagtttcaggagcgtcttaaagaagatacgtcttttgggggcaacctcggacgagcagtcttccaggcgaaaaagagggttcttgaacctctgggcctggttgaggaacctgttaagacggctccgggaaaaaagaggccggtagagcactctcctgcggagccagactcctcctcgggaaccggaaaagcgggccagcagcctgcaagaaagagattgaatttcggtcagactggagacgcagactccgtacctgacccccagcctctcggacagccaccagcagcccccacaagtttgggatctactacaatggctacaggcagtggcgcaccaatggcagacaataacgagggtgccgatggagtgggtaattcctcaggaaattggcattgcgattcccaatggctgggcgacagagtcatcaccaccagcacccgaacctgggccctgcccacctacaacaaccacctctacaagcaaatctccagccaatcaggagcatcgaacgacaaccactactttggctacagcaccccttgggggtattttgacttcaacagattccactgtcacttctccccacgtgactggcaaagactcatcaacaacaactggggattccgacccaagagactcaacttcaagctctttaacattcaagtcaaagaggtcacgcagaatgacggtacgacgacgattgccaataaccttaccagcacggttcaggtgtttactgactcggagtaccagctcccgtacgtcctcggctcggcgcatcaaggatgcctcccgccgtttccagcggacgtcttcatggtcccacagtatggatacctcaccctgaacaacgggagtcaggcggtaggacgctcttccttttactgcctggagtactttccttctcagatgctgcgtaccggaaacaactttaccttcagctacacctttgaggacgtgcctttccacagcagctacgctcacagccagagtttggaccggctgatgaatcctctgatcgaccagtatctgtattatctgaacaggacacaatcaaatagtggaactcttcagcagtctaggctactgtttagccaagctggacccaccagcatgtctcttcaagctaaaaactggctgcctggaccttgctacagacagcagcgtctgtcaaagcaggcaaacgacaacaacaacagcaactttccctggactgcggctacaaagtatcatctaaatggtcgggactcgttggttaatccaggaccagctatggccagccacaaagacgatgaagaaaagtttttccccatgcatggaaccctgatatttggtaaacaaggaacaaatgctaacgacgcggatttggaacatgtcatgattacagatgaagaagaaatcaggaccaccaatcccgtggctacagagcagtacggaaacgtgtcaaataatttgcaaaactcaaatactggtccaactacagaaaatgtcaatcaccagggagcgttacctggtatggtgtggcaggatcgagacgtgtacctgcagggacccatttgggccaagattcctcacaccgacggacactttcacccttctccactgatgggaggttttggactcaaacacccgcctcctcaaatcatgatcaaaaacactcctgttccagccaatcctcctacaaacttcagcgcggcaaagtttgcttccttcatcacacagtattccacgggacaggtcagcgtggagatcgagtgggagctgcagaaggagaacagcaaacgctggaaccccgagatccagtacacttccaactacaacaaatctgttaatgtggactttactgtggacactaatggtgtgtattcagagcctcgccccattggcaccagatacctgactcgtaatctgtaa

SEQ ID NO: 13098 - DNA, 2208 bp, Artificial Sequence
  source: /note="Description of Artificial Sequence: Synthetic polynucleotide"
atggctgccgatggttatcttccagattggctcgaggacactctctctgaaggaataagacagtggtggaagctcaaacctggcccaccaccgccaaagcccgcagagcggcacaaggacgacagtaggggtcttgtgcttcctgggtacaagtacctcggacccttcaacggactcgacaaaggagagccggtcaacgaggcagacgccgcggccctcgagcacgacaaggcctacgaccggcagctcgacagcggagacaacccgtacctcaagtacaaccacgccgacgcggagtttcaggagcgtcttaaagaagatacgtcttttgggggcaacctcggacgagcagtattccaggcgaaaaagagggttcttgaacctctgggcctggttgaggagcctgttaagacggctccgggaaaaaagaggccggtagagcactctcctgtggagccagactcctcctcgggaaccggaaaagcgggccagcagcctgcaagaaaaagattgaattttggtcagactggagacgcagactccgtacctgacccccagcctctcggacagccaccagcagcccccacaagtttgggatctactacaatggctacaggcagtggcgcaccaatggcagacaataacgagggtgccgatggagtgggtaattcctcaggaaattggcattgcgattcccaatggctgggcgacagagtcatcaccaccagcacccgaacctgggccctgcccacctacaacaaccacctctacaagcaaatctccagccaatcaggagcatcgaacgacaaccactactttggccacagcaccccttgggggtattttgacttcaacagattccactgtcacttctccccacgtgactggcaaagactcatcaacaacaactggggattccgacccaagagactcaacttcaagctctttaacattcaagtcaaagaggtcacgcagaatgacggtacgacgacgattgccaataaccttaccagcacggttcaggtgtttactgactcggagtaccagctcccgtacgtcctcggctcggcgcatcaaggatgcctcccgccgttcccagcagacgtcttcatggtcccacagtatggatacctcaccctgaacaacgggagtcaggcggtaggacgctcttccttttactgcctggagtactttccttctcagatgcttcgtaccggaaacaactttaccttcagctacacctttgaagacgtgcctttccacagtagctacgctcacagccagagtctggatcggctgatgaatcctcttatcgaccagtacctgtattatctaaacaaaacacaatcaaatagtggaactcttcagcagtctcggctactgtttagtcaagctggacccaccagcatgtctcttcaagctaaaaactggctgcctggaccttgctacagacaacagcgtctgtcaaagcaggcaaacgacaacaacaacagcaactttccctggactgcggctacaaagtatcatctaaatggccgggactcgttggttaatccaggaccagctatggccagccacaaagacgatgaagaaaagtttttccccatgcatggaaccctgatatttggtaaacaaggaacaaatgctaacgacgcggatttggacaatgtcatgattacagatgaagaagaaatccgcaccaccaatcccgtggctacggagcagtacgggactgtgtcaaataatttgcaaaactcaaatactggtccaactactggaactgtcaatcaccaaggagcgttacctggtatggtgtggcaggatcgagacgtgtacctgcagggacccatttgggccaagattcctcacaccgatggacactttcatccttctccactgatgggaggttttggactcaaacacccgcctcctcagatcatgatcaaaaacactcccgttccagccaatcctcctacaaacttcagttctgccaagtctgcttccttcatcacacagtattccacgggacaagtcagcgtggagattgagtgggagctgcagaaggagaacagcaaacgctggaaccccgagatccagtacacttccaactacaacaaatctgttaatgtggactttactgtggacactaatggcgtgtattcagagcctcgccccattggcaccagatacctgactcgtaatctgtaa

SEQ ID NO: 13099 - DNA, 2208 bp, Artificial Sequence
  source: /note="Description of Artificial Sequence: Synthetic polynucleotide"
atggctgccgatggttatcttccagattggctcgaggacactctctctgaaggaataagacagtggtggaagctcaaacctggcccaccaccgccaaagcccgcagagcggcacaaggacgacagtaggggtcttgtgcttcctgggtacaagtacctcggacccttcaacggactcgacaaaggagagccggtcaacgaggcagacgccgcggccctcgagcacgacaaggcctacgaccggcagctcgacagcggagacaacccgtacctcaagtacaaccacgccgacgcggagtttcaggagcgtcttaaagaagatacgtcttttgggggcaacctcggacgagcagtcttccaggcgaaaaagagggttcttgaacctctgggcctggttgaggaacctgttaagacggctccgggaaaaaagaggccggtagagcactctcctgtggagccagactcctcctcgggaaccggaaaggcgggccagcagcctgcaagaaaaagattgaattttggtcagactggagacgcagactcagtacctgacccccagcctctcggacagccaccagcagccccctctggtctgggaactaatacgatggctacaggcagtggcgcaccaatggcagacaataacgagggcgccgacggagtgggtaattcctcgggaaattggcattgcgattccacatggatgggcgacagagtcatcaccaccagcacccgaacctgggccctgcccacctacaacaaccacctctacaaacaaatttccagccaatcaggagcctcgaacgacaatcactactttggctacagcaccccttgggggtattttgacttcaacagattccactgccacttttcaccacgtgactggcaaagactcatcaacaacaactggggattccgacccaagagactcaacttcaagctctttaacattcaagtcaaagaggtcacgcagaatgacggtacgacgacgattgccaataaccttaccagcacggttcaggtgtttactgactcggagtaccagctcccgtacgtcctcggctcggcgcatcaaggatgcctcccgccgttcccagcagacgtcttcatggtcccacagtatggatacctcaccctgaacaacgggagtcaggcggtaggacgctcttccttttactgcctggagtactttccttctcagatgcttcgtaccggaaacaactttaccttcagctacacctttgaagacgtgcctttccacagtagctacgctcacagccagagtctggatcggctgatgaatcctcttatcgaccagtacctgtattatctaaacaaaacacaatcaaatagtggaactcttcagcagtctcggctactgtttagtcaagctggacccaccagcatgtctcttcaagctaaaaactggctgcctggaccttgctacagacaacagcgtctgtcaaagcaggcaaacgacaacaacaacagcaactttccctggactgcggctacaaagtatcatctaaatggccgggactcgttggttaatccaggaccagctatggccagccacaaagacgatgaagaaaagtttttccccatgcatggaaccctgatatttggtaaacaaggaacaaatgctaacgacgcggatttggacaatgtcatgattacagatgaagaagaaatccgcaccaccaatcccgtggctacggagcagtacgggactgtgtcaaataatttgcaaaactcaaatactggtccaactactggaactgtcaatcaccaaggagcgttacctggtatggtgtggcaggatcgagacgtgtacctgcagggacccatttgggccaagattcctcacaccgatggacactttcatccttctccactgatgggaggttttggactcaaacacccgcctcctcagatcatgatcaaaaacactcccgttccagccaatcctcctacaaacttcagttctgccaagtttgcttccttcatcacacagtattccacgggacaagtcagcgtggagattgagtgggagctgcagaaggagaacagcaaacgctggaaccccgagatccagtacacttccaactacaacaaatctgttaatgtggactttactgtggacactaatggcgtgtattcagagcctcgccccattggcaccagatacctgactcgtaatctgtaa

SEQ ID NO: 13100 - DNA, 2208 bp, Artificial Sequence
  source: /note="Description of Artificial Sequence: Synthetic polynucleotide"
atggctgccgatggttatcttccagattggctcgaggacactctccctgaaggaataagacagtggtggaagctcaaacctggcccaccaccgccaaagcccgcagagcggcacaaggacgacagtaggggtcttgtgcttcctgggtacaagtacctcggacccttcaacggactcgacaaaggagagccggtcaacgaggcagacgccgcggccctcgagcacgacaaggcctacgaccggcagctcgacagcggagacaacccgtacctcaagtacaaccacgccgacgcggagtttcaggagcgtcttaaagaagatacgtcttttgggggcaacctcggacgagcagtattccaggcgaaaaagagggttcttgaacctctgggcctggttgaggagcctgttaagacggctccgggaaaaaagaggccggtagagcactctcctgtggagccagactcctcctcgggaaccggaaaagcgggccagcagcctgcaagaaaaagattgaattttggtcagactggagacgcagactccgtacctgacccccagcctctcggacagccaccagcagcccccacaagtttgggatctactacaatggctacaggcagtggcgcaccaatggcagacaataacgagggtgccgatggagtgggtaattcctcaggaaattggcattgcgattcccaatggctgggcgacagagtcatcaccaccagcacccgaacctgggccctgcccacctacaacaaccacctctacaagcaaatctccagccaatcaggagcatcgaacgacaaccactactttggccacagcaccccttgggggtattttgacttcaacagattccactgtcacttctccccacgtgactggcaaagactcatcaacaacaactggggattccgacccaagagactcaacttcaagctctttaacattcaagtcaaagaggtcacgcagaatgacggtacgacgacgattgccaataaccttaccagcacggttcaggtgtttactgactcggagtaccagctcccgtacgtcctcggctcggcgcatcaaggatgcctcccgccgttcccagcagacgtcttcatggtcccacagtatggatacctcaccctgaacaacgggagtcaggcggtaggacgctcttccttttactgcctggagtactttccttctcagatgcttcgtaccggaaacaactttaccttcagctacacctttgaagacgtgcctttccacagtagctacgctcacagccagagtctggatcggctgatgaatcctcttatcgaccagtacctgtattatctaaacaaaacacaatcaaatagtggaactcttcagcagtctcggctactgtttagtcaagctggacccaccagcatgtctcttcaagctaaaaactggctgcctggaccttgctacagacaacagcgtctgtcaaagcaggcaaacgacaacaacaacagcaactttccctggactgcggctacaaagtatcatctaaatggccgggactcgttggttaatccaggaccagctatggccagccacaaagacgatgaagaaaagtttttccccatgcatggaaccctgatatttggtaaacaaggaacaaatgctaacgacgcggatttggacaatgtcatgattacagatgaagaagaaatccgcaccaccaatcccgtggctacggagcagtacgggactgtgtcaaataatttgcaaaactcaaatactggtccaactactggaactgtcaatcaccaaggagcgttacctggtatggtgtggcaggatcgagacgtgtacctgcagggacccatttgggccaagattcctcacaccgatggacactttcatccttctccactgatgggaggttttggactcaaacacccgcctcctcagatcatgatcaaaaacactcccgttccagccaatcctcctacaaacttcagttctgccaagtttgcttccttcatcacacagtattccacgggacaagtcagcgtggagattgagtgggagctgcagaaggagaacagcaaacgctggaaccccgagatccagtacacttccaactacaacaaatctgttaatgtggactttactgtggacactaatggcgtgtattcagagcctcgccccattggcaccagatacctgactcgtaatctgtaa

SEQ ID NO: 13101 - DNA, 2208 bp, Artificial Sequence
  source: /note="Description of Artificial Sequence: Synthetic polynucleotide"
atggctgccgatggttatcttccagattggctcgaggacactctctctgaaggaataagacagtggtggaagctcaaacctggcccaccaccgccaaagcccgcagagcggcacaaggacgacagtaggggtcttgtgcttcctgggtacaagtacctcggacccttcaacggactcgacaaaggagagccggtcaacgaggcagacgccgcggccctcgagcacgacaaggcctacgaccggcagctcgacagcggagacaacccgtacctcaagtacaaccacgccgacgcggagtttcaggagcgtcttaaagaagatacgtcttttgggggcaacctcggacgagcagtattccaggcgaaaaagagggttcttgaacctctgggcctggttgaggagcctgttaagacggctccgggaaaaaagaggccggtagagcactctcctgtggagccagactcctcctcgggaaccggaaaagcgggccagcagcctgcaagaaaaagattgaattttggtcagactggagacgcagactccgtacctgacccccagcctctcggacagacaccagcagcccccacaagtttgggatctactacaatggctacaggcagtggcgcaccaatggcagacaataacgagggtgccgatggagtgggtaattcctcgggaaattggcattgcgattcccaatggctgggcgacagagtcatcaccaccagcacccgaacctgggccctgcccacctacaacaaccacctctacaagcaaatctccagccaatcaggagcatcgaacgacaaccactactttggctacagcaccccttgggggtattttgacttcaacagattccactgtcacttctccccacgtgactggcaaagactcatcaacaacaactggggattccgacccaagagactcaacttcaagctctttaacattcaagtcaaagaggtcacgcagaatgacggtacgacgacgattgccaataaccttaccagcacggttcaggtgtttactgactcggagtaccagctcccgtacgtcctcggctcggcgcatcaaggatgcctcccgccgttcccagcagacgtcttcatggtcccacagtatggatacctcaccctgaacaacgggagtcaggcggtaggacgctcttccttttactgcctggagtactttccttctcagatgcttcgtaccggaaacaactttaccttcagctacacctttgaagacgtgcctttccacagtagctacgctcacagccagagtctggatcggctgatgaatcctcttatcgaccagtacctgtattatctaaacaaaacacaatcaaatagtggaactcttcagcagtctcggctactgtttagtcaagctggacccaccagcatgtctcttcaagctaaaaactggctgcctggaccttgctacagacaacagcgtctgtcaaagcaggcaaacgacaacaacaacagcaactttccctggactgcggctacaaagtatcatctaaatggccgggactcgttggttaatccaggaccagctatggccagccacaaagacgatgaagaaaagtttttccccatgcatggaaccctgatatttggtaaacaaggaacaaatgctaacgacgcggatttggacaatgtcatgattacagatgaagaagaaatccgcaccaccaatcccgtggctacggagcagtacgggactgtgtcaaataatttgcaaaactcaaatactggtccaactactggaactgtcaatcaccaaggagcgttacctggtatggtgtggcaggatcgagacgtgtacctgcagggacccatttgggccaagattcctcacaccgatggacactttcatccttctccactgatgggaggttttggactcaaacacccgcctcctcagatcatgatcaaaaacactcccgttccagccaatcctcctacaaacttcagttctgccaagtttgcttccttcatcacacagtattccacaggacaagtcggcgtggagattgagtgggagctgcagaaggagaacagcaaacgctggaaccccgagatccagtacacttccaactacaacaaatctgttaatgtggactttactgtggacactaatggcgtgtattcagagcctcgccccattggcaccagatacctgactcgtaatctgtaa

SEQ ID NO: 13102 - DNA, 2208 bp, Artificial Sequence
  source: /note="Description of Artificial Sequence: Synthetic polynucleotide"
atggctgccgatggttatcttccagattggctcgaggacactctctctgaaggaataagacagtggtggaagctcaaacctggcccaccaccgccaaagcccgcagagcggcacaaggacgacagtaggggtcttgtgcttcctgggtacaagtacctcggacccttcaacggactcgacaaaggagagccggtcaacgaggcagacgccgcggccctcgagcacgacaaggcctacgaccggcagctcgacagcggagacaacccgtacctcaagtacaaccacgccgacgcggagtttcaggagcgtcttaaagaagatacgtcttttgggggcaacctcggacgagcagtattccaggcgaaaaagagggttcttgaacctctgggcctggttgaggagcctgttaagacggctccgggaaaaaagaggccggtagagcactctcctgtggagccagactcctcctcgggaaccggaaaagcgggccagcagcctgcaagaaaaagattgaattttggtcagactggagacgcagactccgtacctgacccccagcctctcggacagacaccagcagcccccacaagtttgggatctactacaatggctacaggcagtggcgcaccaatggcagacaataacgagggtgccgatggagtgggtaattcctcgggaaattggcattgcgattcccaatggctgggcgacagagtcatcaccaccagcacccgaacctgggccctgcccacctacaacaaccacctctacaagcaaatctccagccaatcaggagcatcgaacgacaaccactactttggctacagcaccccttgggggtattttgacttcaacagattccactgtcacttctccccacgtgactggcaaagactcatcaacaacaactggggattccgacccaagagactcaacttcaagctctttaacattcaagtcaaagaggtcacgcagaatgacggtacgacgacgattgccaataaccttaccagcacggttcaggtgtttactgactcggagtaccagctcccgtacgtcctcggctcggcgcatcaaggatgcctcccgccgttcccagcagacgtcttcatggtcccacagtatggatacctcaccctgaacaacgggagtcaggcggtaggacgctcttccttttactgcctggagtactttccttctcagatgcttcgtaccggaaacaactttaccttcagctacacctttgaagacgtgcctttccacagtagctacgctcacagccagagtctggatcggctgatgaatcctcttatcgaccagtacctgtattatctaaacaaaacacaatcaaatagtggaactcttcagcagtctcggctactgtttagtcaagctggacccaccagcatgtctcttcaagctaaaaactggctgcctggaccttgctacagacaacagcgtctgtcaaagcaggcaaacgacaacaacaacagcaactttccctggactgcggctacaaagtatcatctaaatggccgggactcgttggttaatccaggaccagctatggccagccacaaagacgatgaagaaaagtttttccccatgcatggaaccctgatatttggtaaacaaggaacaaatgctaacgacgcggatttggacaatgtcatgattacagatgaagaagaaatccgcaccaccaatcccgtggctacggagcagtacgggactgtgtcaaataatttgcaaaactcaaatactggtccaactactggaactgtcaatcaccaaggagcgttacctggtatggtgtggcaggatcgagacgtgtacctgcagggacccatttgggccaagattcctcacaccgatggacactttcatccttctccactgatgggaggttttggactcaaacacccgcctcctcagatcatgatcaaaaacactcccgttccagccaatcctcctacaaacttcagttctgccaagtttgcttccttcatcacacagtattccacgggacaagtcagcgtggagattgagtgggagctgcagaaggagaacagcaaacgctggaaccccgagatccagtacacttccaactacaacaaatctgttaatgtggactttactgtggacactaatggcgtgtattcagagcctcgccccattggcaccagatacctgactcgtaatctgtaa

SEQ ID NO: 13103 - DNA, 2208 bp, Artificial Sequence
  source: /note="Description of Artificial Sequence: Synthetic polynucleotide"
atggctgccgatggttatcttccagattggctcgaggacactctctctgaaggaataagacagtggtggaagctcaaacctggcccaccaccgccaaagcccgcagagcggcacaaggacgacagtaggggtcttgtgcttcctgggtacaagtacctcggacccttcaacggactcgacaaaggagagccggtcaacgaggcagacgccgcggccctcgagcacgacaaggcctacgaccggcagctcgacagcggagacaacccgtacctcaagtacaaccacgccgacgcggagtttcaggagcgtcttaaagaagatacgtcttttgggggcaacctcggacgagcagtattccaggcgaaaaagagggttcttgaacctctgggcctggttgaggagcctgttaagacggctccgggaaaaaagaggccggtagagcactctcctgtggagccagactcctcctcgggaaccggaaaagcgggccagcagcctgcaagaaaaagattgaattttggtcagactggagacgcagactccgtacctgacccccagcctctcggacagccaccagcagcccccacaagtttgggatctactacaatggctacaggcagtggcgcaccaatggcagacaataacgagggtgccgatggagtgggtaattcctcaggaaatcggcattgcgattcccaatggctgggcgacagagtcatcaccaccagcacccgaacctgggccctgcccacctacaacaaccacctctacaagcaaatctccagccaatcaggagcatcgaacgacaaccactactttggccacagcaccccttgggggtattttgacttcaacagattccactgtcacttctccccacgtgactggcaaagactcatcaacaacaactggggattccgacccaagagactcaacttcaagctctttaacattcaagtcaaagaggtcacgcagaatgacggtacgacgacgattgccaataaccttaccagcacggttcaggtgtttactgactcggagtaccagctcccgtacgtcctcggctcggcgcatcaaggatgcctcccgccgttcccagcagacgtcttcatggtcccacagtatggatacctcaccctgaacaacgggagtcaggcggtaggacgctcttccttttactgcctggagtactttccttctcagatgcttcgtaccggaaacaactttaccttcagctacacctttgaagacgtgcctttccacagtagctacgctcacagccagagtctggatcggctgatgaatcctcttatcgaccagtacctgtattatctaaacaaaacacaatcaaatagtggaactcttcagcagtctcggctactgtttagtcaagctggacccaccagcatgtctcttcaagctaaaaactggctgcctggaccttgctacagacaacagcgtctgtcaaagcaggcaaacgacaacaacaacagcaactttccctggactgcggctacaaagtatcatctaaatggccgggactcgttggttaatccaggaccagctatggccagccacaaagacgatgaagaaaagtttttccccatgcatggaaccctgatatttggtaaacaaggaacaaatgctaacgacgcggatttggacaatgtcatgattacagatgaagaagaaatccgcaccaccaatcccgtggctacggagcagtacgggactgtgtcaaataatttgcaaaactcaaatactggtccaactactggaactgtcaatcaccaaggagcgttacctggtatggtgtggcaggatcgagacgtgtacctgcagggacccatttgggccaagattcctcacaccgatggacactttcatccttctccactgatgggaggttttggactcaaacacccgcctcctcagatcatgatcaaaaacactcccgttccagccaatcctcctacaaacttcagttctgccaagtttgcttccttcatcacacagtattccacgggacaagtcagcgtggagattgagtgggagctgcagaaggagaacagcaaacgctggaaccccgagatccagtacacttccaactacaacaaatctgttaatgtggactttactgtggacactaatggcgtgtattcagagcctcgccccattggcaccagatacctgactcgtaatctgtaa

SEQ ID NO: 13104 - DNA, 2208 bp, Artificial Sequence
  source: /note="Description of Artificial Sequence: Synthetic polynucleotide"
atggctgccgatggttatcttccagattggctcgaggacactctctctgaaggaataagacagtggtggaagctcaaacctggcccaccaccgccaaagcccgcagagcggcacaaggacgacagtaggggtcttgtgcttcctgggtacaagtacctcggacccttcaacggactcgacaaaggagagccggtcaacgaggcagacgccgcggccctcgagcacgacaaggcctacgaccggcagctcgacagcggagacaacccgtacctcaagtacaaccacgccgacgcggagtttcaggagcgtcttaaagaagatacgtcttttgggggcaacctcggacgagcagtattccaggcgaaaaagagggttcttgaacctctgggcctggttgaggagcctgttaagacggctccgggaaaaaagaggccggtagagcactctcctgtggagccagactcctcctcgggaaccggaaaagcgggccagcagcctgcaagaaaaagattgaattttggtcagactggagacgcagactccgtacctgacccccagcctctcggacagccaccagcagcccccacaagtttgggatctactacaatggctacaggcagtggcgcaccaatggcagacaataacgagggtgccgatggagtgggtaattcctcaggaaattggcattgcgattcccaatggctgggcgacagagtcatcaccaccagcacccgaacctgggccctgcccacctacaacaaccacctctacaagcaaatctccagccaatcaggagcatcgaacgacaaccactactttggctacagcaccccttgggggtattttgacttcaacagattccactgtcacttctccccacgtgactggcaaagactcatcaacaacaactggggattccgacccaagagactcaacttcaagctctttaacattcaagtcaaagaggtcacgcagaatgacggtacgacgacgattgccaataaccttaccagcacggttcaggtgtttactgactcggagtaccagctcccgtacgtcctcggctcggcgcatcaaggatgcctcccgccgttcccagcagacgtcttcatggtcccacagtatggatacctcaccctgaacaacgggagtcaggcggtaggacgctcttccttttactgcctggagtactttccttctcagatgcctcgtaccggaaacaactttaccttcagctacacctttgaagacgtgcctttccacagtagctacgctcacagccagagtctggatcggctgatgaatcctcttatcgaccagtacctgtattatctaaacaaaacacaatcaaatagtggaactcttcagcagtctcggctactgtttagtcaagctggacccaccagcatgtctcttcaagctaaaaactggctgcctggaccttgctacagacaacagcgtctgtcaaagcaggcaaacgacaacaacaacagcaactttccctggactgcggctacaaagtatcatctaaatggccgggactcgttggttaatccaggaccagctatggccagccacaaagacgatgaagaaaagtttttccccatgcatggaaccctgatatttggtaaacaaggaacaaatgctaacgacgcggatttggacaatgtcatgattacagatgaagaagaaatccgcaccaccaatcccgtggctacggagcagtacgggactgtgtcaaataatttgcaaaactcaaatactggtccaactactggaactgtcaatcaccaaggagcgttacctggtatggtgtggcaggatcgagacgtgtacctgcagggacccatttgggccaagattcctcacaccgatggacactttcatccttctccactgatgggaggttttggactcaaacacccgcctcctcagatcatgatcaaaaacactcccgttccagccaatcctcctacaaacttcagttctgccaagtttgcttccttcatcacacagtattccacgggacaagtcagcgtggagattgagtgggagctgcagaaggagaacagcaaacgctggaaccccgagatccagtacacttccaactacaacaaatctgttaatgtggactttactgtggacactaatggcgtgtattcagagcctcgccccattggcaccagatacctgactcgtaatctgtaa

SEQ ID NO: 13105 - DNA, 2208 bp, Artificial Sequence
  source: /note="Description of Artificial Sequence: Synthetic polynucleotide"
atggctgccgatggttatcttccagattggctcgaggacactctctctgaaggaataagacagtggtggaagctcaaacctggcccaccaccgccaaagcccgcagagcggcacaaggacgacagtaggggtcttgtgcttcctgggtacaagtacctcggacccttcaacggactcgacaaaggagagccggtcaacgaggcagacgccgcggccctcgagcacgacaaggcctacgaccggcagctcgacagcggagacaacccgtacctcaagtacaaccacgccgacgcggagtttcaggagcgtcttaaagaagatacgtcttttgggggcaacctcggacgagcagtattccaggcgaaaaagagggttcttgaacctctgggcctggttgaggagcctgttaagacggctccgggaaaaaagaggccggtagagcactctcctgtggagccagactcctcctcgggaaccggaaaagcgggccagcagcctgcaagaaaaagattgaattttggtcagactggagacgcagactccgtacctgacccccagcctctcggacagccaccagcagcccccacaagtttgggatctactacaatggctacaggcagtggcgcaccaatggcagacaataacgagggtgccgatggagtgggtaattcctcgggaaattggcattgcgattcccaatggctgggcgacagagtcatcaccaccagcacccgaacctgggccctgcccacctacaacaaccacctctacaagcaaatctccagccaatcaggagcatcgaacgacaaccactactttggctacagcaccccttgggggtattttgacttcaacagattccactgtcacttctccccacgtgactggcaaagactcatcaacaacaactggggattccgacccaagagactcaacttcaagctctttaacattcaagtcaaagaggtcacgcagaatgacggtacgacgacgattgccaataaccttaccagcacggttcaggtgtttactgactcggagtaccagctcccgtacgtcctcggctcggcgcatcaaggatgcctcccgccgttcccagcagacgtcttcatggtcccacagtatggatacctcaccctgaacaacgggagtcaggcggtaggacgctcttccttttactgcctggagtactttccttctcagatgcttcgtaccggaaacaactttaccttcagctacacctttgaagacgtgcctttccacagtagctacgctcacagccagagtctggatcggctgatgaatcctcttatcgaccagtacctgtattatctaaacaaaacacaatcaaatagtggaactcttcagcagtctcggctactgtttagtcaagctggacccaccagcatgtctcttcaagctaaaaactggctgcctggaccttgctacagacaacagcgtctgtcaaagcaggcaaacgacaacaacaacagcaactttccctggactgcggctacaaagtatcatctaaatggccgggactcgttggttaatccaggaccagctatggccagccacaaagacgatgaagaaaagtttttccccatgcatggaaccctgatatttggtaaacaaggaacaaatgctaacgacgcggatttggacaatgtcatgattacagatgaagaagaaatccgcaccaccaatcccgtggctacggagcagtacgggactgtgtcaaataatttgcaaaactcaaatactggtccaactactggaactgtcaatcaccaaggagcgttacctggtatggtgtggcaggatcgagacgtgtacctgcagggacccatttgggccaagattcctcacaccgatggacactttcatccttctccactgatgggaggttttggactcaaacacccgcctcctcagatcatgatcaaaaacactcccgttccagccaatcctcctacaaacttcagttctgccaagtctgcttccttcatcacacagtattccacgggacaagtcagcgtggagattgagtgggagctgcagaaggagaacagcaaacgctggaaccccgagatccagtacacttccaactacaacaaatctgttaatgtggactttactgtggacactaatggcgtgtattcagagcctcgccccattggcaccagatacctgactcgtaatctgtaa

SEQ ID NO: 13106 - DNA, 2208 bp, Artificial Sequence
  source: /note="Description of Artificial Sequence: Synthetic polynucleotide"
atggctgccgatggttatcttccagattggctcgaggacactctctctgaaggaataagacagtggtggaagctcaaacctggcccaccaccgccaaagcccgcagagcggcacaaggacgacagtaggggtcttgtgcttcctgggtacaagtacctcggacccttcaacggactcgacaaaggagagccggtcaacgaggcagacgccgcggccctcgagcacgacaaggcctacgaccggcagctcgacagcggagacaacccgtacctcaagtacaaccacgccgacgcggagtttcaggagcgtcttaaagaagatacgtcttttgggggcaacctcggacgagcagtattccaggcgaaaaagagggttcttgaacctctgggcctggttgaggagcctgttaagacggctccgggaaaaaagaggccggtagagcactctcctgtggagccagactcctcctcgggaaccggaaaagcgggccagcagcctgcaagaaaaagattgaattttggtcagactggagacgcagactccgtacctgacccccagcctctcggacagccaccagcagcccccacaagtttgggatctactacaatggctacaggcagtggcgcaccaatggcagacaataacgagggtgccgatggagtgggtaattcctcaggaaattggcattgcgattcccaatggctgggcgacagagtcatcaccaccagcacccgaacctgggccctgcccacctacaacaaccacctctacaagcaaatctccagccaatcaggagcatcgaacgacaaccactactttggccacagcaccccttgggggtattttgacttcaacagattccactgtcacttctccccacgtgactggcaaagactcatcaacaacaactggggattccgacccaagagactcaacttcaagctctttaacattcaagtcaaagaggtcacgcagaatgacggtacgacgacgattgccaataaccttaccagcacggttcaggtgtttactgactcggagtaccagctcccgtacgtcctcggctcggcgcatcaaggatgcctcccgccgttcccagcagacgtcttcatggtcccacagtatggatacctcaccctgaacaacgggagtcaggcggtaggacgctcttccttttactgcctggagtactttccttctcagatgcttcgtaccggaaacaactttaccttcagctacacctttgaagacgcgcctttccacagtagctacgctcacagccagagtctggatcggctgatgaatcctcttatcgaccagtacctgtattatctaaacaaaacaaacaatcaaagtggaaccttcacgcagtctcggctactgtttagtcaagctggacccaccagcattctcttcaagtctaaaaactggctgcctggaccttgctacagacaacagcgtctgtcaaagacagcaaacgacaacaacaacagcaactttccctggactgcggctacaaagtatcatctaaatggccgggactcgttggttaatccaggaccagctatggccagccacaaagacgatgaagaaaagttttttccccagcatggaaccctgatatttggtaaacaaggaacaaagctaacagacgcggatttggacaatgtcatgattacagatgaagaagaaatccgcaccaccaatcccgtggctacggagcagtacgggactgtgtcaaataatttgcagaaactcaacatactggcaactactggaactgtcaacacacaaggagcgttacctggtatggtgtggcaggatcgagacgtgtacctgcagggacccatttgggccaagattcctcacaccgatggacactttcatccttctccactgatgggaggttttggactcaaacacccgcctcctcagatcatgatcaaaaacactcccgttccagccaatcctcctacaaacttcagttctgccaagtttgcttccttcatcacacagtattccacgggacaagtcagcgtggagattgagtgggagctgcagaaggagaacagcaaacgctggaaccccgagatccagtacacttccaactacaacaaatctgttaatgtggactttactgtggacactaatggcgtgtattcagagcctcgccccattggcaccagatacctgactcgtaatctgtaa

SEQ ID NO: 13107 - DNA, 2208 bp, Artificial Sequence
  source: /note="Description of Artificial Sequence: Synthetic polynucleotide"
atggctgccgatggttatcttccagattggctcgaggacactctctctgaaggaataagacagtggtggaagctcaaacctggcccaccaccgccaaagcccgcagagcggcacaaggacgccagtaggggtcttgtgcttcctgggtacaagtacctcggacccttcaacggactcgacaaaggagagccggtcaacgaggcagacgccgcggccctcgagcacgacaaggcctacgaccggcagctcgacagcggagacaacccgtacctcaagtacaaccacgccgacgcggagtttcaggagcgtcttaaagaagatacgtcttttgggggcaacctcggacgagcagtattccaggcgaaaaagagggttcttgaacctctgggcctggttgaggagcctgttaagacggctccgggaaaaaagaggccggtagagcactctcctgtggagccagactcctcctcgggaaccggaaaagcgggccagcagcctgcaagaaaaagattgaattttggtcagactggagacgcagactccgtacctgacccccagcctctcggacagccaccagcagcccccacaagtttgggatctactacaatggctacaggcagtggcgcaccaatggcagacaataacgagggtgccgatggagtgggtaattcctcaggaaattggcattgcgattcccaatggctgggcgacagagtcatcaccaccagcacccgaacctgggccctgcccacctacaacaaccacctctacaagcaaatctccagccaatcaggagcatcgaacgacaaccactactttggctacagcaccccttgggggtattttgacttcaacagattccactgtcacttctccccacgtgactggcaaagactcatcaacaacaactggggattccgacccaagagactcaacttcaagctctttaacattcaagtcaaagaggtcacgcagaatgacggtacgacgacgattgccaataaccttaccagcacggttcaggtgtttactgactcggagtaccagctcccgtacgtcctcggctcggcgcatcaaggatgcctcccgccgttcccagcagacgtcttcatggtcccacagtatggatacctcaccctgaacaacgggagtcaggcggtaggacgctcttccttttactgcctggagtactttccttctcagatgcttcgtaccggaaacaactttaccttcagctacacctttgaagacgtgcctttccacagtagctacgctcacagccagagtctggatcggctgatgaatcctcttatcgaccagtacctgtattatctaaacaaaacaaacaatcaaagtggaaccttcacgcagtctcggctactgtttagtcaagctggacccaccagcattctcttcaagtctaaaaactggctgcctggaccttgctacagacaacagcgtctgtcaaagacagcaaacgacaacaacaacagcaactttccctggactgcggctacaaagtatcatctaaatggccgggactcgttggttaatccaggaccagctatggccagccacaaagacgatgaagaaaagttttttcccatgcatggaaccctgatatttggtaaacaaggaacaaagctaacagacgcggatttggacaatgtcatgattacagatgaagaagaaatccgcaccaccaatcccgtggctacggagcagtacgggactgtgtcaaataatttgcagaaactcaacatactggcaactactggaactgtcaacacacaaggagcgttacctggtatggtgtggcaggatcgagacgtgtacctgcagggacccatttgggccaagattcctcacaccgatggacactttcatccttctccactgatgggaggttttggactcaaacacccgcctcctcagatcatgatcaaaaacactcccgttccagccaatcctcctacaaacttcagttctgccaagtttgcttccttcatcacacagtattccacgggacaagtcagcgtggagattgagtgggagctgcagaaggagaacagcaaacgctggaaccccgagatccagtacacttccaactacaacaaatctgttaatgtggactttactgtggacactaatggcgtgtattcagagcctcgccccattggcaccagatacctgactcgtaatctgtaa

SEQ ID NO: 13108 - DNA, 2208 bp, Artificial Sequence
  source: /note="Description of Artificial Sequence: Synthetic polynucleotide"
atggctgccgatggttatcttccagattggctcgaggacactctctctgaaggaataagacagtggtggaagctcaaacctggcccaccaccaccaaagcccgcagagcggcataaggacgacagcaggggtcttgtgcttcctgggtacaagtacctcggacccttcaacggactcgacaagggagagccggtcaacgaggcagacgccgcggccctcgagcacgacaaagcctacgaccggcagctcgacagcggagacaacccgtacctcaagtacaaccacgccgacgcggagtttcaggagcgccttaaagaagatacgtcttttgggggcaacctcggacgagcagtcttccaggcgaaaaagagggttcttgaacctctgggcctggttgaggaacctgttaagacggctccgggaaaaaagaggccggtagagcactctcctgtggagccagactcctcctcgggaaccggaaaggcgggccagcagcctgcaagaaaaagattgaattttggtcagactggagacgcagactcagtacctgacccccagcctctcggacagccaccagcagccccctctggtctgggaactaatacgatggctacaggcagtggcgcaccaatggcagacaataacgagggcgccgacggagtgggtaattcctcgggaaattggcattgcgattccacatggatgggcgacagagtcatcaccaccagcacccgaacctgggccctgcccacctacaacaaccacctctacaagcaaatctccagccaatcaggagcatcgaacgacaaccactactttggctacagcaccccttgggggtattttgacttcaacagattccactgtcacttctccccacgtgactggcaaagactcatcaacaacaactggggattccgacccaagagactcaacttcaagctctttaacattcaagtcaaagaggtcacgcagaatgacggtacgacgacgattgccaataaccttaccagcacggttcaggtgtttactgactcggagtaccagctcccgtacgtcctcggctcggcgcatcaaggatgcctcccgccgttcccagcagacgtcttcatggtcccacagtatggatacctcaccctgaacaacgggagtcaggcggtaggacgctcttccttttactgcctggagtactttccttctcagatgcttcgtaccggaaacaactttaccttcagctacacctttgaagacgtgcctttccacagtagctacgctcacagccagagtctggatcggctgatgaatcctcttatcgaccagtacctgtattatctaaacaaaacaaacaatcaaagtggaaccttcacgcagtctcggctactgtttagtcaagctggacccaccagcattctcttcaagtctaaaaactggctgcctggaccttgctacagacaacagcgtctgtcaaagacagcaaacgacaacaacaacagcaactttccctggactgcggctacaaagtatcatctaaatggccgggactcgttggttaatccaggaccagctatggccagccacaaagacgatgaagaaaagttttttccccagcatggaaccctgatatttggtaaacaaggaacaaagctaacagacgcggatttggacaatgtcatgattacagatgaagaagaaatccgcaccaccaatcccgtggctacggagcagtacgggactgtgtcaaataatttgcagaaactcaacatactggcaactactggaactgtcaacacacaaggagcgttacctggtatggtgtggcaggatcgagacgtgtacctgcagggacccatttgggccaagattcctcacaccgatggacactttcatccttctccactgatgggaggttttggactcaaacacccgcctcctcagatcatgatcaaaaacactcccgttccagccaatcctcctacaaacttcagttctgccaagtttgcttccttcatcacacagtattccacgggacaagtcagcgtggagattgagtgggagctgcagaaggagaacagcaaacgctggaaccccgagatccagtacacttccaactacaacaaatctgttaatgtggactttactgtggacactaatggcgtgtattcagagcctcgccccattggcaccagatacctgactcgtaatctgtaa

SEQ ID NO: 13109 - DNA, 2208 bp, Artificial Sequence
  source: /note="Description of Artificial Sequence: Synthetic polynucleotide"
atggctgccgatggttatcttccagattggctcgaggacactctctctgaaggaataagacagtggtggaagctcaaacctggcccaccaccgccaaagcccgcagagcggcacaaggacgacagtaggggtcttgtgcttcctgggtacaagtacctcggacccttcaacggactcgacaaaggagagccggtcaacgaggcagacgccgcggccctcgagcacgacaaggcctacgaccggcagctcgacagcggagacaacccgtacctcaagtacaaccacgccgacgcggagtttcaggagcgtcttaaagaagatacgtcttttgggggcaacctcggacgagcagtattccaggcgaaaaagagggttcttgaacctctgggcctggttgaggagcctgttaagacggctccgggaaaaaagaggccggtagagcactctcctgtggagccagactcctcctcgggaaccggaaaagcgggccagcagcctgcaagaaaaagattgaattttggtcagactggagacgcagactccgtacctgacccccagcctctcggacagccaccagcagcccccacaagtttgggatctactacaatggctacaggcagtggcgcaccaatggcagacaataacgagggtgccgatggagtgggtaattcctcaggaaattggcattgcgattcccaatggctgggcgacagagtcatcaccaccagcacccgaacctgggccctgcccacctacaacaaccacctctacaagcaaatctccagccaatcaggagcatcgaacgacaaccactactttggccacagcaccccttgggggtattttgacttcaacagattccactgtcacttctccccacgtgactggcaaagactcatcaacaacaactggggattccgacccaagagactcaacttcaagctctttaacattcaagtcaaagaggtcacgcagaatgacggtacgacgacgattgccaataaccttaccagcacggttcaggtgtttactgactcggagtaccagctcccgtacgtcctcggctcggcgcatcaaggatgcctcccgccgttcccagcagacgtcttcatggtcccacagtatggatacctcaccctgaacaacgggagtcaggcggtaggacgctcttccttttactgcctggagtactttccttctcagatgcttcgtaccggaaacaactttaccttcagctacacctttgaagacgtgcctttccacagtagctacgctcacagccagagtctggatcggctgatgaatcctcttatcgaccagtacctgtattatctaaacaaaacaaacaatcaaagtggaaccttcacgcagtctcggctactgtttagtcaagctggacccaccagcattctcttcaagtctaaaaactggctgcctggaccttgctacagacaacagcgtctgtcaaagacagcaaacgacaacaacaacagcaactttccctggactgcggctacaaagtatcatctaaatggccgggactcgttggttaatccaggaccagctatggccagccacaaagacgatgaagaaaagttttttcccatgcatggaaccctgatatttggtaaacaaggaacaaagctaacagacgcggatttggacaatgtcatgattacagatgaagaagaaatccgcaccaccaatcccgtggctacggagcagtacgggactgtgtcaaataatttgcagaaactcaacatactggcaactactggaactgtcaacacacaaggagcgttacctggtatggtgtggcaggatcgagacgtgtacctgcagggacccatttgggccaagattcctcacaccgatggacactttcatccttctccactgatgggaggttttggactcaaacacccgcctcctcagatcatgatcaaaaacactcccgttccagccaatcctcctacaaacttcagttctgccaagtttgcttccttcatcacacagtattccacgggacaagtcagcgtggagattgagtgggagctgcagaaggagaacagcaaacgctggaaccccgagatccagtacacttccaactacaacaaatctgttaatgtggactttactgtggacactaatggcgtgtattcagagcctcgccccattggcaccagatacctgactcgtaatctgtaa

SEQ ID NO: 13110 - DNA, 2208 bp, Artificial Sequence
  source: /note="Description of Artificial Sequence: Synthetic polynucleotide"
atggctgccgatggttatcttccagattggctcgaggacactctctctgaaggaataagacagtggtggaagctcaaacctggcccaccaccgccaaagcccgcagagcggcacaaggacgacagtaggggtcttgtgcttcctgggtacaagtacctcggacccttcaacggactcgacaaaggagagccggtcaacgaggcagacgccgcggccctcgagcacgacaaggcctacgaccggcagctcgacagcggagacaacccgtacctcaagtacaaccacgccgacgcggagtttcaggagcgtcttaaagaagatacgtcttttgggggcaacctcggacgagcagtattccaggcgaaaaagagggttcttgaacctctgggcctggttgaggagcctgttaagacggctccgggaaaaaagaggccggtagagcactctcctgtggagccagactcctcctcgggaaccggaaaagcgggccagcagcctgcaagaaaaagattgaattttggtcagactggagacgcagactccgtacctgacccccagcctctcggacagccaccagcagcccccacaagtttgggatctactacaatggctacaggcagtggcgcaccaatggcagacaataacgagggtgccgatggagtgggtaattcctcaggaaattggcattgcgattcccaatggctgggcgacagagtcatcaccaccagcacccgaacctgggccctgcccacctacaacaaccacctctacaagcaaatctccagccaatcaggagcatcgaacgacaaccactactttggctacagcaccccttgggggtattttgacttcaacagattccactgtcacttctccccacgtgactggcaaagactcatcaacaacaactggggattccgacccaagagactcaacttcaagctctttaacattcaagtcaaagaggtcacgcagaatgacggtacgacgacgattgccaataaccttaccagcacggttcaggtgtttactgactcggagtaccagctcccgtacgtcctcggctcggcgcatcaaggatgcctcccgccgttcccagcagacgtcttcatggtcccacagtatggatacctcaccctgaacaacgggagtcaggcggtaggacgctcttccttttactgcctggagtactttccttctcagatgcttcgtaccggaaacaactttaccttcagctacacctttgaagacgtgcctttccacagtagctacgctcacagccagagtctggatcggctgatgaatcctcttatcgaccagtacctgtattatctaaacaaaacaaacaatcaaagtggaaccttcacgcagtctcggctactgtttagtcaagctggacccaccagcattctcttcaagtctaaaaactggctgcctggaccttgctacagacaacagcgtctgtcaaagacagcaaacgacaacaacaacagcaactttccctggactgcggctacaaagtatcatctaaatggccgggactcgttggttaatccaggaccagctatggccagccacaaagacgatgaagaaaagttttttccccagcatggaaccctgatatttggtaaacaaggaacaaagctaacagacgcggatttggacaatgtcatgattacagatgaagaagaaatccgcaccaccaatcccgtggctacggagcagtacgggactgtgtcaaataatttgcagaaactcaacatactggcaactactggaactgtcaacacacaaggagcgttacctggtatggtgtggcaggatcgagacgtgtacctgcagggacccatttgggccaagattcctcacaccgatggacactttcatccttctccactgatgggaggttttggactcaaacacccgcctcctcagatcatgatcaaaaacactcccgttccagccaatcctcctacaaacttcagttctgccaagtttgcttccttcatcacacagtattccacgggacaagtcagcgtggagattgagtgggagctgcagaaggagaacagcaaacgctggaaccccgagatccagtacacttccaactacaacaaatctgttaatgtggactttactgtggacactaatggcgtgtattcagagcctcgccccattggcaccagatacctgactcgtaatctgtaa

SEQ ID NO: 13111 - DNA, 2208 bp, Artificial Sequence
  source: /note="Description of Artificial Sequence: Synthetic polynucleotide"
atggctgccgatggttatcttccagattggctcgaggacactctctctgaaggaataagacagtggtggaagctcaaacctggcccaccaccgccaaagcccgcagagcggcacaaggacgccagtaggggtcttgtgcttcctgggtacaagtacctcggacccttcaacggactcgacaaaggagagccggtcaacgaggcagacgccgcggccctcgagcacgacaaggcctacgaccggcagctcgacagcggagacaacccgtacctcaagtacaaccacgccgacgcggagtttcaggagcgtcttaaagaagatacgccttttgggggcaacctcggacgagcagtattccaggcgaaaaagagggttcttgaacctctgggcctggttgaggagcctgttaagacggctccgggaaaaaagaggccggtagagcactctcctgtggagccagactcctcctcgggaaccggaaaagcgggccagcggcctgcaagaaaaagattgaattttggtcagactggagacgcagactccgtacctgacccccagcctctcggacagccaccagcagcccccacaagtttgggatctactacaatggctacaggcagtggcgcaccaatggcagacaataacgagggtgccgatggagtgggtaattcctcaggaaattggcattgcgattcccaatggctgggcgacagagtcatcaccaccagcacccgaacctgggccctgcccacctacaacaaccacctctacaagcaaatccccagccaatcaggagcatcgaacgacaaccactactttggctacagcaccccttgggggtattttgacttcaacagattccactgtcacttctccccacgtgactggcaaagactcatcaacaacaactggggattccgacccaagagactcaacttcaagctctttaacattcaagtcaaagaggtcacgcagaatgacggtacgacgacgattgccaataaccttaccagcacggttcaggtgtttactgactcggagtaccagctcccgtacgtcctcggctcggcgcatcaaggatgcctcccgccgttcccagcagacgtcttcatggtcccacagtatggatacctcaccctgaacaacgggagtcaggcggtaggacgctcttccttttactgcctggagtactttccttctcagatgcttcgtaccggaaacaactttaccttcagctacacctttgaagacgtgcctttccacagtagctacgctcacagccagagtctggatcggctgatgaatcctcttatcgaccagtacctgtattatctaaacaaaacaaacaatcaaagtggaaccttcacgcagtctcggctactgtttagtcaagctggacccaccagcattctcttcaagtctaaaaactggctgcctggaccttgctacagacaacagcgtctgtcaaagacagcaaacgacaacaacaacagcaactttccctggactgcggctacaaagtatcatctaaatggccgggactcgttggttaatccaggaccagctatggccagccacaaagacgatgaagaaaagttttttccccaacatggaaccctgatatttggtaaacaaggaacaaagctaacagacgcggatttggacaatgtcatgattacagatgaagaagaaatccgcaccaccaatcccgtggctacggagcagtacgggactgtgtcaaataatttgcagaaactcaacatactggcaactactggaactgtcaacacacaaggagcgttacctggtatggtgtggcaggatcgagacgtgtacctgcagggacccatttgggccaagattcctcacaccgatggacactttcatccttctccactgatgggaggttttggactcaaacacccgcctcctcagatcatgatcaaaaacactcccgttccagccaatcctcctacaaacttcagttctgccaagtttgcttccttcatcacacagtattccacgggacaagtcagcgtggagattgagtgggagctgcagaaggagaacagcaaacgctggaaccccgagatccagtacacttccaactacaacaaatctgttaatgtggactttactgtggacactaatggcgtgtattcagagcctcgccccattggcaccagatacctgactcgtaatctgtaa

SEQ ID NO: 13112 - DNA, 2208 bp, Artificial Sequence
  source: /note="Description of Artificial Sequence: Synthetic polynucleotide"
atggctgccgatggttatcttccagattggctcgaggacactctctctgaaggaataagacagtggtggaagctcaaacctggcccaccaccaccaaagcccgcagagcggcataaggacgacagcaggggtcttgtgcttcctgggtacaagtacctcggacccttcaacggactcgacaagggagagccggtcaacgaggcagacgccgcggccctcgagcacgacaaagcctacgaccggcagctcgacagcggagacaacccgtacctcaagtacaaccacgccgacgcggagtttcaggagcgccttaaagaagatacgtcttttgggggcaacctcggacgagcagtcttccaggcgaaaaagagggttcttgaacctctgggcctggttgaggaacctgttaagacggctccgggaaaaaagaggccggtagagcactctcctgtggagccagactcctcctcgggaaccggaaaggcgggccagcagcctgcaagaaaaagattgaattttggtcagactggagacgcagactcagtacctgacccccagcctctcggacagccaccagcagccccctctggtctgggaactaatacgatggctacaggcagtggcgcaccaatggcagacaataacgagggcgccgacggagtgggtaattcctcgggaaattggcattgcgattccacatggatgggcgacagagtcatcaccaccagcacccgaacctgggccctgcccacctacaacaaccacctctacaaacaaatttccagccaatcaggagcctcgaacgacaatcactactttggctacagcaccccttgggggtattttgacttcaacagattccactgccacttttcaccacgtgactggcaaagactcatcaacaacaactggggattccgacccaagagactcaacttcaagctctttaacattcaagtcaaagaggtcacgcagaatgacggtacgacgacgattgccaataaccttaccagcacggttcaggtgtttactgactcggagtaccagctcccgtacgtcctcggctcggcgcatcaaggatgcctcccgccgttcccagcagacgtcttcatggtcccacagtatggatacctcaccctgaacaacgggagtcaggcggtaggacgctcttccttttactgcctggagtactttccttctcagatgcttcgtaccggaaacaactttaccttcagctacacctttgaagacgcgcctttccacagtagctacgctcacagccagagtctggatcggctgatgaatcctcttatcgaccagtacctgtattatctaaacaaaacaaacaatcaaagtggaaccttcacgcagtctcggctactgtttagtcaagctggacccaccagcattctcttcaagtctaaaaactggctgcctggaccttgctacagacaacagcgtctgtcaaagacagcaaacgacaacaacaacagcaactttccctggactgcggctacaaagtatcatctaaatggccgggactcgttggttaatccaggaccagctatggccagccacaaagacgatgaagaaaagttttttccccagcatggaaccctgatatttggtaaacaaggaacaaagctaacagacgcggatttggacaatgtcatgattacagatgaagaagaaatccgcaccaccaatcccgtggctacggagcagtacgggactgtgtcaaataatttgcagaaactcaacatactggcaactactggaactgtcaacacacaaggagcgttacctggtatggtgtggcaggatcgagacgtgtacctgcagggacccatttgggccaagattcctcacaccgatggacactttcatccttctccactgatgggaggttttggactcaaacacccgcctcctcagatcatgatcaaaaacactcccgttccagccaatcctcctacaaacttcagttctgccaagtttgcttccttcatcacacagtattccacgggacaagtcagcgtggagattgagtgggagctgcagaaggagaacagcaaacgctggaaccccgagatccagtacacttccaactacaacaaatctgttaatgtggactttactgtggacactaatggcgtgtattcagagcctcgccccattggcaccagatacctgactcgtaatctgtaa

SEQ ID NO: 13113 - DNA, 2208 bp, Artificial Sequence
  source: /note="Description of Artificial Sequence: Synthetic polynucleotide"
atggctgccgatggttatcttccagattggctcgaggacattctctctgaaggaataagacagtggtggaagctcaaacctggcccaccaccgccaaagcccgcagagcggcacaaggacgccagtaggggtcttgtgcttcctgggtacaagtacctcggacccttcaacggactcgacaaaggagagccggtcaacgaggcagacgccgcggccctcgagcacgacaaggcctacgaccggcagctcgacagcggagacaacccgtacctcaagtacaaccacgccgacgcggagtttcaggagcgtcttaaagaagatacgtcttttgggggcaacctcggacgagcagtattccaggcgaaaaagagggttcttgaacctctgggcctggttgaggagcctgttaagacggctccgggaaaaaagaggccggtagagcactctcctgtggagccagactcctcctcgggaaccggaaaagcgggccagcagcctgcaagaaaaagattgaattttggtcagactggagacgcagactccgtacctgacccccagcctctcggacagccaccagcagcccccacaagtttgggatctactacaatggctacaggcagtggcgcaccaatggcagacaataacgagggtgccgatggagtgggtaattcctcaggaaattggcattgcgattcccaatggctgggcgacagagtcatcaccaccagcacccgaacctgggccctgcccacctacaacaaccacctctacaagcaaatctccagccaatcaggagcatcgaacgacaaccactactttggctacagcaccccttgggggtattttgacttcaacagattccactgtcacttctccccacgtgactggcaaagactcatcaacaacaactggggattccgacccaagagactcaacttcaagctctttaacattcaagtcaaagaggtcacgcagaatgacggtacgacgacgattgccaataaccttaccagcacggttcaggtgtttactgactcggagtaccagctcccgtacgtcctcggctcggcgcatcaaggatgcctcccgccgttcccagcagacgtcttcatggtcccacagtatggatacctcaccctgaacaacgggagtcaggcggtaggacgctcttccttttactgcctggagtactttccttctcagatgcttcgtaccggaaacaactttaccttcagctacacctttgaagacgtgcctttccacagtagctacgctcacagccagagtctggatcggctgatgaatcctcttatcgaccagtacctgtattatctaaacaaaacaaacaatcaaagtggaaccttcacgcagtctcggctactgtttagtcaagctggacccaccagcattctcttcaagtctaaaaactggctgcctggaccttgctacagacaacagcgtctgtcaaagacagcaaacgacaacaacaacagcaactttccctggactgcggctacaaagtatcatctaaatggccgggactcgttggttaatccaggaccagctatggccagccacaaagacgatgaagaaaagttttttccccagcatggaaccctgatatttggtaaacaaggaacaaagctaacagacgcggatttggacaatgtcatgattacagatgaagaagaaatccgcaccaccaatcccgtggctacggagcagtacgggactgtgtcaaataatttgcagaaactcaacatactggcaactactggaactgtcaacacacaaggagcgttacctggtatggtgtggcaggatcgagacgtgtacctgcagggacccatttgggccaagattcctcacaccgatggacactttcatccttctccactgatgggaggttttggactcaaacacccgcctcctcagatcatgatcaaaaacactcccgttccagccaatcctcctacaaacttcagttctgccaagtttgcttccttcatcacacagtattccacgggacaagtcagcgtggagattgagtgggagctgcagaaggagaacagcaaacgctggaaccccgagatccagtacacttccaactacaacaaatctgttaatgtggactttactgtggacactaatggcgtgtattcagagcctcgccccattggcaccagatacctgactcgtaatctgtaa

SEQ ID NO: 13114 - DNA, 2208 bp, Artificial Sequence
  source: /note="Description of Artificial Sequence: Synthetic polynucleotide"
atggctgccgatggttatcttccagattggctcgaggacattctctctgaaggaataagacagtggtggaagctcaaacctggcccaccaccgccaaagcccgcagagcggcacaaggacgccagtaggggtcttgtgcttcctgggtacaagtacctcggacccttcaacggactcgacaaaggagagccggtcaacgaggcagacgccgcggccctcgagcacgacaaggcctacgaccggcagctcgacagcggagacaacccgtacctcaagtacaaccacgccgacgcggagtttcaggagcgtcttaaagaagatacgtcttttgggggcaacctcggacgagcagtattccaggcgaaaaagagggttcttgaacctctgggcctggttgaggagcctgttaagacggctccgggaaaaaagaggccggtagagcactctcctgtggagccagactcctcctcgggaaccggaaaagcgggccagcagcctgcaagaaaaagattgaattttggtcagactggagacgcagactccgtacctgacccccagcctctcggacagccaccagcagcccccacaagtttgggatctactacaatggctacaggcagtggcgcaccaatggcagacaataacgagggtgccgatggagtgggtaattcctcaggaaattggcattgcgattcccaatggctgggcgacagagtcatcgccaccagcacccgaacctgggccctgcccacctacaacaaccacctctacaagcaaatctccagccaatcaggagcatcgaacgacaaccactactttggctacagcaccccttgggggtattttgacttcaacagattccactgtcacttctccccacgtgactggcaaagactcatcaacaacaactggggattccgacccaagagactcaacttcaagctctttaacattcaagtcaaagaggtcacgcagaatgacggtacgacgacgattgccaataaccttaccagcacggttcaggtgtttactgactcggagtaccagctcccgtacgtcctcggctcggcgcatcaaggatgcctcccgccgttcccagcagacgtcttcatggtcccacagtatggatacctcaccctgaacaacgggagtcaggcggtaggacgctcttccttttactgcctggagtactttccttctcagatgcttcgtaccggaaacaactttaccttcagctacacctttgaagacgtgcctttccacagtagctacgctcacagccagagtctggatcggctgatgaatcctcttatcgaccagtacctgtattatctaaacaaaacaaacaatcaaagtggaaccttcacgcagtctcggctactgcttagtcaagctggacccaccagcattctcttcaagtctaaaaactggctgcctggaccttgctacagacaacagcgtctgtcaaagacagcaaacgacaacaacaacagcaactttccctggactgcggctacaaagtatcatctaaatggccgggactcgttggttaatccaggaccagctatggccagccacaaagacgatgaagaaaagttttttccccaacatggaaccctgatatttggtaaacaaggaacaaagctaacagacgcggatttggacaatgtcatgattacagatgaagaagaaatccgcaccaccaatcccgtggctacggagcagtacgggactgtgtcaaataatttgcagaaactcaacatactggcaactactggaactgtcaacacacaaggagcgttacctggtatggtgtggcaggatcgagacgtgtacctgcagggacccatttgggccaagattcctcacaccgatggacactttcatccttctccactgatgggaggttttggactcaaacacccgcctcctcagatcatgatcaaaaacactcccgttccagccaatcctcctacaaacttcagttctgccaagtttgcttccttcatcacacagtattccacgggacaagtcagcgtggagattgagtgggagctgcagaaggagaacagcaaacgctggaaccccgagatccagtacacttccaactacaacaaatctgttaatgtggactttactgtggacactaatggcgtgtattcagagcctcgccccattggcaccagatacctgactcgtaatctgtaa

SEQ ID NO: 13115 - DNA, 2208 bp, Artificial Sequence
  source: /note="Description of Artificial Sequence: Synthetic polynucleotide"
atggctgccgatggttatcttccagattggctcgaggacactctctctgaaggaataagacagtggtggaagctcaaacctggcccaccaccgccaaagcccgcagagcggcacaaggacgccagtaggggtcttgtgcttcctgggtacaagtacctcggacccttcaacggactcgacaaaggagagccggtcaacgaggcagacgccgcggccctcgagcacgacaaggcctacgaccggcagctcgacagcggagacaacccgtacctcaagtacaaccacgccgacgcggagtttcaggagcgtcttaaagaagatacgccttttgggggcaacctcggacgagcagtattccaggcgaaaaagagggttcttgaacctctgggcctggttgaggagcctgttaagacggctccgggaaaaaagaggccggtagagcactctcctgtggagccagactcctcctcgggaaccggaaaagcgggccagcagcctgcaagaaaaagattgaattttggtcagactggagacgcagactccgtacctgacccccagcctctcggacagccaccagcagcccccacaagtttgggatctactacaatggctacaggcagtggcgcaccaatggcagacaataacgagggtgccgatggagtgggtaattcctcaggaaattggcattgcgattcccaatggctgggcgacagagtcatcaccaccagcacccgaacctgggccctgcccacctacaacaaccacctctacaagcaaatccccagccaatcaggagcatcgaacgacaaccactactttggctacagcaccccttgggggtattttgacttcaacagattccactgtcacttctccccacgtgactggcaaagactcatcaacaacaactggggattccgacccaagagactcaacttcaagctctttaacattcaagtcaaagaggtcacgcagaatgacggtacgacgacgattgccaataaccttaccagcacggttcaggtgtttactgactcggagtaccagctcccgtacgtcctcggctcggcgcatcaaggatgcctcccgccgttcccagcagacgtcttcatggtcccacagtatggatacctcaccctgaacaacgggagtcaggcggtaggacgctcttccttttactgcctggagtactttccttctcagatgcttcgtaccggaaacaactttaccttcagctacacctttgaagacgtgcctttccacagtagctacgctcacagccagagtctggatcggctgatgaatcctcttatcgaccagtacctgtattatctaaacaaaacaaacaatcaaagtggaaccttcacgcagtctcggctactgtttagtcaagctggacccaccagcattctcttcaagtctaaaaactggctgcctggaccttgctacagacaacagcgtctgtcaaagacagcaaacgacaacaacaacagcaactttccctggactgcggctacaaagtatcatctaaatggccgggactcgttggttaatccaggaccagctatggccagccacaaagacgatgaagaaaagttttttccccaacatggaaccctgatatttggtaaacaaggaacaaagctaacagacgcggatttggacaatgtcatgattacagatgaagaagaaatccgcaccaccaatcccgtggctacggagcagtacgggactgtgtcaaataatttgcagaaactcaacatactggcaactactggaactgtcaacacacaaggagcgttacctggtatggtgtggcaggatcgagacgtgtacctgcagggacccatttgggccaagattcctcacaccgatggacactttcatccttctccactgatgggaggttttggactcaaacacccgcctcctcagatcatgatcaaaaacactcccgttccagccaatcctcctacaaacttcagttctgccaagtttgcttccttcatcacacagtattccacgggacaagtcagcgtggagattgagtgggagctgcagaaggagaacagcaaacgctggaaccccgagatccagtacacttccaactacaacaaatctgttaatgtggactttactgtggacactaatggcgtgtattcagagcctcgccccattggcaccagatacctgactcgtaatctgtaa

SEQ ID NO: 13116 - DNA, 2208 bp, Artificial Sequence
  source: /note="Description of Artificial Sequence: Synthetic polynucleotide"
atggctgccgatggttatcttccagattggctcgaggacactctctctgaaggaataagacagtggtggaagctcaaacctggcccaccaccaccaaagcccgcagagcggcataaggacgacagcaggggtcttgtgcttcctgggtacaagtacctcggacccttcaacggactcgacaagggagagccggtcaacgaggcagacgccgcggccctcgagcacgacaaagcctacgaccggcagctcgacagcggagacaacccgtacctcaagtacaaccacgccgacgcggagtttcaggagcgccttaaagaagatacgtcttttgggggcaacctcggacgagcagtcttccaggcgaaaaagagggttcttgaacctctgggcctggttgaggaacctgttaagacggctccgggaaaaaagaggccggtagagcactctcctgtggagccagactcctcctcgggaaccggaaaggcgggccagcagcctgcaagaaaaagattgaawtttggtcagactggagacgcagactcagtacctgacccccagcctctcggacagccaccagcagccccctctggtctsggaactaatacgatggctacaggcagtggcgcaccaatggcagacaataacgagggcgccgacgkagtgggtaattcctcgggaaattggcattgcgattccacatggatgggcgacagagtcatcaccaccagcacccgaacctgggccctgcccacctacaacaaccacctctacaaacaaatttccagccaatcaggagcctcgaacgacaatcactactttggctacagcaccccttgggggtattttgacttcaacagattccactgccacttttcaccacgtgactggcaaagactcatcaacaacaactggggattccgacccaagagactcaacttcaagctctttaacattcaagtcaaagaggtcacgcagaatgacggtacgacgacgattgccaataaccttaccagcacggttcaggtgtttactgactcggagtaccagctcccgtacgtcctcggctcggcgcatcaaggatgcctcccgccgttcccagyagacgtcttcatggtgccacagtatggatacctcaccctgaacaacgggagtcaggcagtaggacgctcttcattttactgcctggagtactttccttctcagatgctgcgtaccggaaacaactttaccttcagctacacttttgaggacgttcctttccacagcagctacgctcacagccagagtctggaycgkctsatgaatcctctyatcgaccagtacctgtattatctaaacaaaacaaacaatcaaagtggaaccttcacgcagtctcggctactgtttagtcaagctggacccaccagcattctcttcaagtctaaaaactggctgcctggaccttgctacagacaacagcgtctgtcaaagacagcaaacgacaacaacaacagcaamtttccctggactgcggctacaaagtatcatctaaatggccgggactcgttggttaatccaggaccagctatggccagccacaaagacgatgaagaaaagttttttcccatgcatggaaccytgatatttggtaaacaaggaacaaagctaacagacgcggatttggacaatgtcrtgattacagatgaagaagaaatccgcaccaccaatcccgtggctacggagcagtacgggactgtgtcaaataatttgcagaaactcaacatactgscaactactggaactgtcaacwcacaaggagcgttacctggtatggtgtggcaggatcgagacgtgtacctgcagggacccatttgggccaagattcctcacaccgatggacactttcacccttctccactgatgggaggttttggactcaaacacccgcctcctcagatcatgatcaaaaacactccsgttccagcsaatcctcctacaaacttcagttatgcaaagtttgcttccttcatcacacagtattccacgggacaagtcagcgtggagatggagtgggagctgcagaaggagaacagcaaacgctggaaccccgagattccatacacttccaaatacaacaaatctgttaatgtggactttactgtggacactaatggcgtgtattcagagcctcgccccattggcacccgatacctgactcgtaatctgtaa

SEQ ID NO: 13117 - DNA, 2208 bp, Artificial Sequence
  source: /note="Description of Artificial Sequence: Synthetic polynucleotide"
atggctgccgatggttatcttccagattggctcgaggacactctctctgaaggaataagacagtggtggaagctcaaacctggcccaccaccaccaaagcccgcagagcggcatcaggacgacagcaggggtcttgtgcttcctgggtacaagtacctcggacccttcaacggactcgacaaaggagagccggtcaacgaggcagacgctgcggccctcgagcacgacaaggcctacgaccggcagctcgacagcggagacaacccgtacctcaagtacaaccacgccgacgcggagtttcaggagcgtcttaaagaagatacgtcttttgggggcaacctcggacgagcagtcttccaggcgaaaaagagggttcttgaacctctgggcctggttgaggaacctgttaagacggctccgggaaaaaagaggccggtagagcactctcctgcggagccagactcctcctcgggaaccggaaaagcgggccagcagcctgcaagaaagagattgaatttcggtcagactggagacgcagactccgtacctgacccccagcctctcggacagccaccagcagcccccacaagtttgggatctactacaatggctacaggcagtggcgcaccaatggcagacaataacgagggtgccgatggagtgggtaattcctcaggaaattggcattgcgattcccaatggctgggcgacagagtcatcaccaccagcacccgaacctgggccctgcccacctacaacaaccacctctacaagcaaatctccagccaatcaggagcatcgaacgacaaccactactttggctacagcaccccttgggggtattttgacttcaacagattccactgtcacttctccccacgtgactggcaaagactcatcaacaacaactggggattccgacccaagagactcaacttcaagctctttaacattcaagtcaaagaggtcacgcagaatgacggtacgacgacgattgccaataaccttaccagcacggttcaggtgtttactgactcggagtaccagctcccgtacgtcctcggctcggcgcatcaaggatgcctcccgccgtttccagcggacgtcttcatggtcccacagtatggatacctcaccctgaacaacgggagtcaggcggtaggacgctcttccttttactgcctggagtactttccttctcagatgctgcgtaccggaaacaactttaccttcagctacacctttgaggacgtgcctttccacagcagctacgctcacagccagagtttggaccggctgatgaatcctctgatcgaccagtatctgtattatctgaacaggacacaatcaaatagtggaactcttcagcagtctaggctactgtttagccaagctggacccaccagcatgtctcttcaagctaaaaactggctgcctggaccttgctacagacagcagcgtctgtcaaagcaggcaaacgacaacaacaacagcaactttccctggactgcggctacaaagtatcatctaaatggtcgggactcgttggttaatccaggaccagctatggccagccacaaagacgatgaagaaaagtttttccccatgcatggaaccctgatatttggtaaacaaggaacaaatgctaacgacgcggatttggaacatgtcatgattacagatgaagaagaaatcaggaccaccaatcccgtggctacagagcagtacggaaacgtgtcaaataatttgcaaaactcaaatactggtccaactacagaaaatgtcaatcaccagggagcgttacctggtatggtgtggcaggatcgagacgtgtacctgcagggacccatttgggccaagattcctcacaccgacggacactttcacccttctccactgatgggaggttttggactcaaacacccgcctcctcaaatcatgatcaaaaacactcctgttccagccaatcctcctacaaacttcagcgcggcaaagtttgcttccttcatcacacagtattccacgggacaggccagcgtggagatcgagtgggagctgcagaaggagaacagcaaacgctggaaccccgagatccagtacacttccaactacaacaaatctgttaatgtggactttactgtggacactaatggtgtgtattcagagcctcgccccattggcaccagatacctgactcgtaatctgtaa

SEQ ID NO: 13118 - DNA, 2208 bp, Artificial Sequence
  source: /note="Description of Artificial Sequence: Synthetic polynucleotide"
atggctgccgatggttatcttccagattggctcgaggacactctctctgaaggaataagacagtggtggaagctcaaacctggcccaccaccgccaaagcccgcagagcggcacaaggacgacagtaggggtcttgtgcttcctgggtacaagtacctcggacccttcaacggactcgacaaaggagagccggtcaacgaggcagacgccgcggccctcgagcacgacaaggcctacgaccggcagctcgacagcggagacaacccgtacctcaagtacaaccacgccgacgcggagtttcaggagcgtcttaaagaagatacgtcttttgggggcaacctcggacgagcagtattccaggcgaaaaagagggttcttgaacctctgggcctggttgaggagcctgttaagacggctccgggaaaaaagaggccggtagagcactctcctgtggagccagactcctcctcgggaaccggaaaagcgggccagcagcctgcaagaaaaagattgaattttggtcagactggagacgcagactccgtacctgacccccagcctctcggacagccaccagcagcccccacaagtttgggatctactacaatggctacaggcagtggcgcaccaatggcagacaataacgagggtgccgatggagtgggtaattcctcaggaaattggcattgcgattcccaatggctgggcgacagagtcatcaccaccagcacccgaacctgggccctgcccacctacaacaaccacctctacaagcaaatctccagccaatcaggagcatcgaacgacaaccactactttggccacagcaccccttgggggtattttgacttcaacagattccactgtcacttctccccacgtgactggcaaagactcatcaacaacaactggggattccgacccaagagactcaacttcaagctctttaacattcaagtcaaagaggtcacgcagaatgacggtacgacgacgattgccaataaccttaccagcacggttcaggtgtttactgactcggagtaccagctcccgtacgtcctcggctcggcgcatcaaggatgcctcccgccgttcccagcagacgtcttcatggtcccacagtatggatacctcaccctgaacaacgggagtcaggcggtaggacgctcttccttttactgcctggagtactttccttctcagatgcttcgtaccggaaacaactttaccttcagctacacctttgaagacgtgcctttccacagtagctacgctcacagccagagtctggatcggctgatgaatcctcttatcgaccagtacctgtattatctaaacaaaacacaatcaaatagtggaactcttcagcagtctcggctactgtttagtcaagctggacccaccagcatgcctcttcaagctaaaaactggctgcctggaccttgctacagacaacagcgtctgtcaaagcaggcaaacgacaacaacaacagcaactttccctggactgcggctacaaagtatcatctaaatggccgggactcgttggttaatccaggaccagctatggccagccacaaagacgatgaagaaaagtttttccccatgcatggaaccctgatatttggtaaacaaggaacaaatgctaacgacgcggatttggacaatgtcatgattacagatgaagaagaaatccgcaccaccaatcccgtggctacggagcagtacgggactgtgtcaaataatttgcaaaactcaaatactggtccaactactggaactgtcaatcaccaaggagcgttacctggtatggtgtggcaggatcgagacgtgtacctgcagggacccatttgggccaagattcctcacaccgatggacactttcatccttctccactgatgggaggttttggactcaaacacccgcctcctcagatcatgatcaaaaacactcccgttccagccaatcctcctacaaacttcagttctgccaagtttgcttccttcatcacacagtattccacgggacaagtcagcgtggagattgagtgggagctgcagaaggagaacagcaaacgctggaaccccgagatccagtacacttccaactacaacaaatctgttaatgtggactttactgtggacactaatggcgtgtattcagagcctcgccccattggcaccagatacctgactcgtaatctgtaa

SEQ ID NO: 13119 - DNA, 2208 bp, Artificial Sequence
  source: /note="Description of Artificial Sequence: Synthetic polynucleotide"
atggctgccgatggttatcttccagattggctcgaggacactctctctgaaggaataagacagtggtggaagctcaaacctggcccaccaccgccaaagcccgcagagcggcacaaggacgacagtaggggtcttgtgcttcctgggtacaagtacctcggacccttcaacggactcgacaaaggagagccggtcaacgaggcagacgccgcggccctcgagcacgacaaggcctacgaccggcagctcgacagcggagacaacccgtacctcaagtacaaccacgccgacgcggagtttcaggagcgtcttaaagaagatacgtcttttgggggcaacctcggacgagcagtattccaggcgaaaaagagggttcttgaacctctgggcctggttgaggagcctgttaagacggctccgggaaaaaagaggccggtagagcactctcctgtggagccagactcctcctcgggaaccggaaaagcgggccagcagcctgcaagaaaaagattgaattttggtcagactggagacgcagactccgtacctgacccccagcctctcggacagccaccagcagcccccacaagtttgggatctactacaatggctacaggcagtggcgcaccaatggcagacaataacgagggtgccgatggagtgggtaattcctcaggaaattggcattgcgattcccaatggctgggcgacagagtcatcaccaccagcacccgaacctgggccctgcccacctacaacaaccacctctacaagcaaatctccagccaatcaggagcatcgaacgacaaccactactttggccacagcaccccttgggggtattttgacttcaacagattccactgtcacttctccccacgtgactggcaaagactcatcaacaacaactggggattccgacccaagagactcaacttcaagctctttaacattcaagtcaaagaggtcacgcagaatgacggtacgacgacgattgccaataaccttaccagcacggttcaggtgtttactgactcggagtaccagctcccgtacgtcctcggctcggcgcatcaaggatgcctcccgccgttcccagcagacgtcttcatggtcccacagtatggatacctcaccctgaacaacgggagtcaggcggtaggacgctcttccttttactgcctggagtactttccttctcagatgcttcgtaccggaaacaactttaccttcagctacacctttgaagacgtgcctttccacagtagctacgctcacagccagagtctggatcggctgatgaatcctcttatcgaccagtacctgtattatctaaacaaaacacaatcaaatagtggaactcttcagcagtctcggctactgtttagtcaagctggacccaccagcatgtctcttcaagctaaaaactggctgcctggaccttgctacagacaacagcgtctgtcaaagcaggcaaacgacaacaacaacagcaactttccctggactgcggctacaaagtatcatctaaatggccgggactcgttggttaatccaggaccagctatggccagccacaaagacgatgaagaaaagtttttccccatgcatggaaccctgatatttggtaaacaaggaacaaatgctaacgacgcggatttggacaatgtcatgattacagatgaagaagaaatccgcaccaccaatcccgtggctacggagcagtacgggactgtgtcaaataatttgcaaaactcaaatactggtccaactactggaactgccaatcaccaaggagcgttacctggtatggtgtggcaggatcgagacgtgtacctgcagggacccatttgggccaagattcctcacaccgatggacactttcatccttctccactgatgggaggttttggactcaaacacccgcctcctcagatcatgatcaaaaacactcccgttccagccaatcctcctacaaacttcagttctgccaagtttgcttccttcatcacacagtattccacgggacaagtcagcgtggagattgagtgggagctgcagaaggagaacagcaaacgctggaaccccgagatccagtacacttccaactacaacaaatctgttaatgtggactttactgtggacactaatggcgtgtattcagagcctcgccccattggcaccagatacctgactcgtaatctgtaa

SEQ ID NO: 13120 - DNA, 2208 bp, Artificial Sequence
  source: /note="Description of Artificial Sequence: Synthetic polynucleotide"
atggctgccgatggttatcttccagattggctcgaggacactctctctgaaggaataagacagtggtggaagctcaaacctggcccaccaccgccaaagcccgcagagcggcacaaggacgacagtaggggtcttgtgcttcctgggtacaagtacctcggacccttcaacggactcgacaaaggagagccggtcaacgaggcagacgccgcggccctcgagcacgacaaggcctacgaccggcagctcgacagcggagacaacccgtacctcaagtacaaccacgccgacgcggagtttcaggagcgtcttaaagaagatacgtcttttgggggcaacctcggacgagcagtattccaggcgaaaaagagggttcttgaacctctgggcctggttgaggagcctgttaagacggctccgggaaaaaagaggccggtagagcactctcctgtggagccagactcctcctcgggaaccggaaaagcgggccagcagcctgcaagaaaaagattgaattttggtcagactggagacgcaggctccgtacctgacccccagcctctcggacagccaccagcagcccccacaagtttgggatctactacaatggctacaggcagtggcgcaccaatggcagacaataacgagggtgccgatggagtgggtaattcctcaggaaattggcattgcgattcccaatggctgggcgacagagtcatcaccaccagcacccgaacctgggccctgcccacctacaacaaccacctctacaagcaaatctccagccaatcaggagcatcgaacgacaaccactactttggccacagcaccccttgggggtattttgacttcaacagattccactgtcacttctccccacgtgactggcaaagactcatcaacaacaactggggattccgacccaagagactcaacttcaagctctttaacattcaagtcaaagaggtcacgcagaatgacggtacgacgacgattgccaataaccttaccagcacggttcaggtgtttactgactcggagtaccagctcccgtacgtcctcggctcggcgcatcaaggatgcctcccgccgttcccagcagacgtcttcatggtcccacagtatggatacctcaccctgaacaacgggagtcaggcggtaggacgctcttccttttactgcctggagtactttccttctcagatgcttcgtaccggaaacaactttaccttcagctacacctttgaagacgtgcctttccacagtagctacgctcacagccagagtctggatcggctgatgaatcctcttatcgaccagtacctgtattatctaaacaaaacacaatcaaatagtggaactcttcagcagtctcggctactgtttagtcaagctggacccaccagcatgtctcttcaagctaaaaactggctgcctggaccttgctacagacaacagcgtctgtcaaagcaggcaaacgacaacaacaacagcaactttccctggactgcggctacaaagtatcatctaaatggccgggactcgttggttaatccaggaccagctatggccagccacaaagacgatgaagaaaagtttttccccatgcatggaaccctgatatttggtaaacaaggaacaaatgctaacgacgcggatttggacaatgtcatgattacagatgaagaagaaatccgcaccaccaatcccgtggctacggagcagtacgggactgtgtcaaataatttgcaaaactcaaatactggtccaactactggaactgtcaatcaccaaggagcgttacctggtatggtgtggcaggatcgagacgtgtacctgcagggacccatttgggccaagattcctcacaccgatggacactttcatccttctccactgatgggaggttttggactcaaacacccgcctcctcagatcatgatcaaaaacactcccgttccagccaatcctcctacaaacttcagttctgccaagtttgcttccttcatcacacagtattccacgggacaagtcagcgtggagattgagtgggagctgcagaaggagaacagcaaacgctggaaccccgagatccagtacacttccaactacaacaaatctgttaatgtggactttactgtggacactaatggcgtgtattcagagcctcgccccattggcaccagatacctgactcgtaatctgtaa

SEQ ID NO: 13121 - DNA, 2208 bp, Artificial Sequence
  source: /note="Description of Artificial Sequence: Synthetic polynucleotide"
atggctgccgatggttatcttccagattggctcgaggacactctctctgaaggaataagacagtggtggaagctcaaacctggcccaccaccgccaaagcccgcagagcggcacaaggacgacagtaggggtcttgtgcttcctgggtacaagtacctcggacccttcaacggactcgacaaaggagagccggtcaacgaggcagacgccgcggccctcgagcacgacaaggcctacgaccggcagctcgacagcggagacaacccgtacctcaagtacaaccacgccgacgcggagtttcaggagcgtcttaaagaagatacgtcttttgggggcaacctcggacgagcagtattccaggcgaaaaagagggttcttgaacctctgggcctggttgaggagcctgttaagacggctccgggaaaaaagaggccggtagagcactctcctgtggagccagactcctcctcgggaaccggaaaagcgggccagcagcctgcaagaaaaagattgaattttggtcagactggagacgcagactccgtacctgacccccagcctctcggacagccaccagcagcccccacaagtttgggatctactacaatggctacaggcagtggcgcaccaatggcagacaataacgagggtgccgatggagtgggtaattcctcaggaaattggcattgcgattcccaatggctggacgacagagtcatcaccaccagcacccgaacctgggccctgcccacctacaacaaccacctctacaagcaaatctccagccaatcaggagcatcgaacgacaaccactactttggccacagcaccccttgggggtattttgacttcaacagattccactgtcacttctccccacgtgactggcaaagactcatcaacaacaactggggattccgacccaagagactcaacttcaagctctttaacattcaagtcaaagaggtcacgcagaatgacggtacgacgacgattgccaataaccttaccagcacggttcaggtgtttactgactcggagtaccagctcccgtacgtcctcggctcggcgcatcaaggatgcctcccgccgttcccagcagacgtcttcatggtcccacagtatggatacctcaccctgaacaacgggagtcaggcggtaggacgctcttccttttactgcctggagtactttccttctcagatgcttcgtaccggaaacaactttaccttcagctacacctttgaagacgtgcctttccacagtagctacgctcacagccagagtctggatcggctgatgaatcctcttatcgaccagtacctgtattatctaaacaaaacacaatcaaatagtggaactcttcagcagtctcggctactgtttagtcaagctggacccaccagcatgtctcttcaagctaaaaactggctgcctggaccttgctacagacaacagcgtctgtcaaagcaggcaaacgacaacaacaacagcaactttccctggactgcggctacaaagtatcatctaaatggccgggactcgttggttaatccaggaccagctatggccagccacaaagacgatgaagaaaagtttttccccatgcatggaaccctgatatttggtaaacaaggaacaaatgctaacgacgcggatttggacaatgtcatgattacagatgaagaagaaatccgcaccaccaatcccgtggctacggagcagtacgggactgtgtcaaataatttgcaaaactcaaatactggtccaactactggaactgtcaatcaccaaggagcgttacctggtatggtgtggcaggatcgagacgtgtacctgcagggacccatttgggccaagattcctcacaccgatggacactttcatccttctccactgatgggaggttttggactcaaacacccgcctcctcagatcatgatcaaaaacactcccgttccagccaatcctcctacaaacttcagttctgccaagtttgcttccttcatcacacagtattccacgggacaagtcagcgtggagattgagtgggagctgcagaaggagaacagcaaacgctggaaccccgagatccagtacacttccaactacaacaaatctgttaatgtggactttactgtggacactaatggcgtgtattcagagcctcgccccattggcaccagatacctgactcgtaatctgtaa

SEQ ID NO: 13122 - DNA, 2208 bp, Artificial Sequence
  source: /note="Description of Artificial Sequence: Synthetic polynucleotide"
atggctgccgatggttatcttccagattggctcgaggacactctctctgaaggaataagacagtggtggaagctcaaacctggcccaccaccgccaaagcccgcagagcggcacaaggacgacagtaggggtcttgtgcttcctgggtacaagtacctcggacccttcaacggactcgacaaaggagagccggtcaacgaggcagacgccgcggccctcgagcacgacaaggcctacgaccggcagctcgacagcggagacaacccgtacctcaagtacaaccacgccgacgcggagtttcaggagcgtcttaaagaagatacgtcttttgggggcaacctcggacgagcagtattccaggcgaaaaagagggttcttgaacctctgggcctggttgaggagcctgttaagacggctccgggaaaaaagaggccggtagagcactctcctgtggagccaggctcctcctcgggaaccggaaaagcgggccagcagcctgcaagaaaaagattgaattttggtcagactggagacgcagactccgtacctgacccccagcctctcggacagccaccagcagcccccacaagtttgggatctactacaatggctacaggcagtggcgcaccaatggcagacaataacgagggtgccgatggagtgggtaattcctcaggaaattggcattgcgattcccaatggctgggcgacagagtcatcaccaccagcacccgaacctgggccctgcccacctacaacaaccacctctacaagcaaatctccagccaatcaggagcatcgaacgacaaccactactttggccacagcaccccttgggggtattttgacttcaacagattccactgtcacttctccccacgtgactggcaaagactcatcaacaacaactggggattccgacccaagagactcaacttcaagctctttaacattcaagtcaaagaggtcacgcagaatgacggtacgacgacgattgccaataaccttaccagcacggttcaggtgtttactgactcggagtaccagctcccgtacgtcctcggctcggcgcatcaaggatgcctcccgccgttcccagcagacgtcttcatggtcccacagtatggatacctcaccctgaacaacgggagtcaggcggtaggacgctcttccttttactgcctggagtactttccttctcagatgcttcgtaccggaaacaactttaccttcagctacacctttgaagacgtgcctttccacagtagctacgctcacagccagagtctggatcggctgatgaatcctcttatcgaccagtacctgtattatctaaacaaaacacaatcaaatagtggaactcttcagcagtctcggctactgtttagtcaagctggacccaccagcatgtctcttcaagctaaaaactggctgcctggaccttgctacagacaacagcgtctgtcaaagcaggcaaacgacaacaacaacagcaactttccctggactgcggctacaaagtatcatctaaatggccgggactcgttggttaatccaggaccagctatggccagccacaaagacgatgaagaaaagtttttccccatgcatggaaccctgatatttggtaaacaaggaacaaatgctaacgacgcggatttggacaatgtcatgattacagatgaagaagaaatccgcaccaccaatcccgtggctacggagcagtacgggactgtgtcaaataatttgcaaaactcaaatactggtccaactactggaactgtcaatcaccaaggagcgttacctggtatggtgtggcaggatcgagacgtgtacctgcagggacccatttgggccaagattcctcacaccgatggacactttcatccttctccactgatgggaggttttggactcaaacacccgcctcctcagatcatgatcaaaaacactcccgttccagccaatcctcctacaaacttcagttctgccaagtttgcttccttcatcacacagtattccacgggacaagtcagcgtggagattgagtgggagctgcagaaggagaacagcaaacgctggaaccccgagatccagtacacttccaactacaacaaatctgttaatgtggactttactgtggacactaatggcgtgtattcagagcctcgccccattggcaccagatacctgactcgtaatctgtaa

SEQ ID NO: 13123 - DNA, 2208 bp, Artificial Sequence
  source: /note="Description of Artificial Sequence: Synthetic polynucleotide"
atggctgccgatggttatcttccagattggctcgaggacactctctctgaaggaataagacagtggtggaagctcaaacctggcccaccaccgccaaagcccgcagagcggcacaaggacgacagtaggggtcttgtgcttcctgggtacaagtacctcggacccttcaacggactcgacaaaggagagccggtcaacgaggcagacgccgcggccctcgagcacgacaaggcctacgaccggcagctcgacagcggagacaacccgtacctcaagtacaaccacgccgacgcggagtttcaggagcgtcttaaagaagatacgtcttttgggggcaacctcggacgagcagtattccaggcgaaaaagagggttcttgaacctctgggcctggttgaggagcctgttaagacggctccgggaaaaaagaggccggtagagcactctcctgtggagccagactcctcctcgggaaccggaaaagcgggccagcagcctgcaagaaaaagattgaattttggtcagactggagacgcagactccgtacctgacccccagcctctcggacagccaccagcagcccccacaagtttgggatctactacaatggctacaggcagtggcgcaccaatggcagacaataacgagggtgccgatggagtgggtaattcctcaggaaattggcattgcgattcccaatggctgggcgacagagtcatcaccaccagcacccgaacctgggccctgcccacctacaacaaccacctctacaagcaaatctccagccaatcaggagcatcgaacgacaaccactactttggccacagcaccccttgggggtattttgacttcaacagattccactgtcacttctccccacgtgactggcaaagactcatcaacaacaactggggattccgacccaagagactcaacttcaagctctttaacattcaagtcaaagaggtcacgcagaatgacggtacgacgacgattgccaataaccttaccagcacggttcaggtgtttactgactcggagtaccagctcccgtacgtcctcggctcggcgcatcaaggatgcctcccgccgttcccagcagacgtcttcatggtcccacagtatggatacctcaccctgaacaacgggagtcaggcggtaggacgctcttccttttactgcctggagtactttccttctcagatgcttcgtaccggaaacaactttaccttcagctacacctttgaagacgtgcctttccacagtagctacgctcacagccagagtctggatcggctgatgaatcctcttatcgaccagtacctgtattatctaaacaaaacacaatcaaatagtggaactcttcagcagtctcggctactgtttagtcaagctggacccaccagcatgtctcttcaagctaaaaactggctgcctggaccttgctacagacaacagcgtctgtcaaagcaggcaaacgacaacaacaacagcaactttccctggactgcggctacaaagtatcatctaaatggccgggactcgttggttaatccaggaccagctatggccagccacaaagacgatgaagaaaagtttttccccatgcatggaaccctgatatttggtaaacaaggaacaaatgctaacgacgcggatttggacaatgtcatgattacagatgaagaagaaatccgcaccaccaatcccgtggctacggagcagtacgggactgtgtcaaataatttgcaaaactcaaatactggtccaactactggaactgtcaatcaccaaggagcgttacctggtatggtgtggcaggatcgagacgtgtacctgcagggacccatttgggccaagattcctcacaccgatggacactttcatccttctccactgatgggaggttttggactcaaacacccgcctcctcagatcatgatcaaaaacactcccgttccagccaatcctcctacaaacttcagttctgccaagtttgcttccttcatcacacagtattccacgggacaagtcagcgtggagattgggtgggagctgcagaaggagaacagcaaacgctggaaccccgagatccagtacacttccaactacaacaaatctgttaatgtggactttactgtggacactaatggcgtgtattcagagcctcgccccattggcaccagatacctgactcgtaatctgtaa

SEQ ID NO: 13124 - DNA, 2208 bp, Artificial Sequence
  source: /note="Description of Artificial Sequence: Synthetic polynucleotide"
atggctgccgatggttatcttccagattggctcgaggacactctctctgaaggaataagacagtggtggaagctcaaacctggcccaccaccgccaaagcccgcagagcggcacaaggacgacagtaggggtcttgtgcttcctgggtacaagtacctcggacccttcaacggactcgacaaaggagagccggtcaacgaggcagacgccgcggccctcgagcacgacaaggcctacgaccggcagctcgacagcggagacaacccgtacctcaagtacaaccacgccgacgcggagtttcaggagcgtcttaaagaagatacgtcttttgggggcaacctcggacgagcagtattccaggcgaaaaagagggttcttgaacctctgggcctggttgaggagcctgttaagacggctccgggaaaaaagaggccggtagagcactctcctgtggagccagactcctcctcgggaaccggaaaagcgggccagcagcctgcaagaaaaagattgaattttggtcagactggagacgcagactccgtacctgacccccagcctctcggacagccaccagcagcccccacaagtttgggatctactacaatggctacaggcagtggcgcaccaatggcagacaataacgagggtgccgatggagtgggtaattcctcaggaaattggcattgcgattcccaatggctgggcgacagagtcatcaccaccagcacccgaacctgggccctgcccacctacaacaaccacctctacaagcaaatctccagccaatcaggagcatcgaacgacaaccactactttggccacagcaccccttgggggtattttgacttcaacagattccactgtcacttctccccacgtgactggcaaagactcatcaacaacaactggggattccgacccaagagactcaacttcaagctctttaacattcaagtcaaagaggtcacgcagaatgacggtacgacgacgattgccaataaccttaccagcacggttcaggtgtttactgactcggagtaccagctcccgtacgtcctcggctcggcgcatcaaggatgcctcccgccgttcccagcagacgtcttcatggtcccacagtatggatacctcaccctgaacaacgggagtcaggcggtaggacgctcttccttttactgcctggagtactttccttctcagatgcttcgtaccggaaacaactttaccttcagctacacctttgaagacgtgcctttccacagtagctacgctcacagccagagtctggatcggctgatgaatcctcttatcgaccggtacctgtattatctaaacaaaacacaatcaaatagtggaactcttcagcagtctcggctactgtttagtcaagctggacccaccagcatgtctcttcaagctaaaaactggctgcctggaccttgctacagacaacagcgtctgtcaaagcaggcaaacgacaacaacaacagcaactttccctggactgcggctacaaagtatcatctaaatggccgggactcgttggttaatccaggaccagctatggccagccacaaagacgatgaagaaaagtttttccccatgcatggaaccctgatatttggtaaacaaggaacaaatgctaacgacgcggatttggacaatgtcatgattacagatgaagaagaaatccgcaccaccaatcccgtggctacggagcagtacgggactgtgtcaaataatttgcaaaactcaaatactggtccaactactggaactgtcaatcaccaaggagcgttacctggtatggtgtggcaggatcgagacgtgtacctgcagggacccatttgggccaagattcctcacaccgatggacactttcatccttctccactgatgggaggttttggactcaaacacccgcctcctcagatcatgatcaaaaacactcccgttccagccaatcctcctacaaacttcagttctgccaagtttgcttccttcatcacacagtattccacgggacaagtcagcgtggagattgagtgggagctgcagaaggagaacagcaaacgctggaaccccgagatccagtacacttccaactacaacaaatctgttaatgtggactttactgtggacactaatggcgtgtattcagagcctcgccccattggcaccagatacctgactcgtaatctgtaa

SEQ ID NO: 13125 - DNA, 2208 bp, Artificial Sequence
  source: /note="Description of Artificial Sequence: Synthetic polynucleotide"
atggctgccgatggttatcttccagattggctcgaggacactctctctgaaggaataagacagtggtggaagctcaaacctggcccaccaccgccaaagcccgcagagcggcacaaggacgacagtaggggtcttgtgcttcctgggtacaagtacctcggacccttcaacggactcgacaaaggagagccggtcaacgaggcagacgccgcggccctcgagcacgacaaggcctacgaccggcagctcgacagcggagacaacccgtacctcaagtacaaccacgccgacgcggagtttcaggagcgtcttaaagaagatacgtcttttgggggcaacctcggacgagcagtattccaggcgaaaaagagggttcttgaacctctgggcctggttgaggagcctgttaagacggctccgggaaaaaagaggccggtagagcactctcctgtggagccagactcctcctcgggaaccggaaaagcgggccagcagcctgcaagaaaaagattgaattttggtcagactggagacgcagactccgtacctgacccccagcctctcggacagccaccagcagcccccacaagtttgggatctactacaatggctacaggcagtggcgcaccaatggcagacaataacgagggtgccgatggagtgggtaattcctcaggaaattggcattgcgattcccaatggctgggcgacagagtcatcaccaccagcacccgaacctgggccctgcccacctacaacaaccacctctacaagcaaatctccagccaatcaggagcatcgaacgacaaccactactttggccacagcaccccttgggggtattttgacttcaacagattccactgtcacttctccccacgtgactggcaaagactcatcaacaacaactggggattccgacccaagagactcaacttcaagctctttaacattcaagtcaaagaggtcacgcagaatgacggtacgacgacgattgccaataaccttaccagcacggttcaggtgtttactgactcggagtaccagctcccgtacgtcctcggctcggcgcatcaaggatgcctcccgccgttcccagcagacgtcttcatggtcccacagtatggatacctcaccctgaacaacgggagtcaggcggtaggacgctcttccttttactgcctggagtactttccttctcagatgcttcgtaccggaaacaactttaccttcagctacacctttgaagacgtgcctttccacagtagctacgctcacagccagagtctggatcggctgatgaatcctcttatcgaccagcacctgtattatctaaacaaaacacaatcaaatagtggaactcttcagcagtctcggctactgtttagtcaagctggacccaccagcatgtctcttcaagctaaaaactggctgcctggaccttgctacagacaacagcgtctgtcaaagcaggcaaacgacaacaacaacagcaactttccctggactgcggctacaaagtatcatctaaatggccgggactcgttggttaatccaggaccagctatggccagccacaaagacgatgaagaaaagtttttccccatgcatggaaccctgatatttggtaaacaaggaacaaatgctaacgacgcggatttggacaatgtcatgattacagatgaagaagaaatccgcaccaccaatcccgtggctacggagcagtacgggactgtgtcaaataatttgcaaaactcaaatactggtccaactactggaactgtcaatcaccaaggagcgttacctggtatggtgtggcaggatcgagacgtgtacctgcagggacccatttgggccaagattcctcacaccgatggacactttcatccttctccactgatgggaggttttggactcaaacacccgcctcctcagatcatgatcaaaaacactcccgttccagccaatcctcctacaaacttcagttctgccaagtttgcttccttcatcacacagtattccacgggacaagtcagcgtggagattgagtgggagctgcagaaggagaacagcaaacgctggaaccccgagatccagtacacttccaactacaacaaatctgttaatgtggactttactgtggacactaatggcgtgtattcagagcctcgccccattggcaccagatacctgactcgtaatctgtaa

SEQ ID NO: 13126 - DNA, 2208 bp, Artificial Sequence
  source: /note="Description of Artificial Sequence: Synthetic polynucleotide"
atggctgccgatggttatcttccagattggctcgaggacactctctctgaaggaataagacagtggtggaagctcaaacctggcccaccaccgccaaagcccgcagagcggcacaaggacgacagtaggggtcctgtgcttcctgggtacaagtacctcggacccttcaacggactcgacaaaggagagccggtcaacgaggcagacgccgcggccctcgagcacgacaaggcctacgaccggcagctcgacagcggagacaacccgtacctcaagtacaaccacgccgacgcggagtttcaggagcgtcttaaagaagatacgtcttttgggggcaacctcggacgagcagtattccaggcgaaaaagagggttcttgaacctctgggcctggttgaggagcctgttaagacggctccgggaaaaaagaggccggtagagcactctcctgtggagccagactcctcctcgggaaccggaaaagcgggccagcagcctgcaagaaaaagattgaattttggtcagactggagacgcagactccgtacctgacccccagcctctcggacagccaccagcagcccccacaagtttgggatctactacaatggctacaggcagtggcgcaccaatggcagacaataacgagggtgccgatggagtgggtaattcctcaggaaattggcattgcgattcccaatggctgggcgacagagtcatcaccaccagcacccgaacctgggccctgcccacctacaacaaccacctctacaagcaaatctccagccaatcaggagcatcgaacgacaaccactactttggccacagcaccccttgggggtattttgacttcaacagattccactgtcacttctccccacgtgactggcaaagactcatcaacaacaactggggattccgacccaagagactcaacttcaagctctttaacattcaagtcaaagaggtcacgcagaatgacggtacgacgacgattgccaataaccttaccagcacggttcaggtgtttactgactcggagtaccagctcccgtacgtcctcggctcggcgcatcaaggatgcctcccgccgttcccagcagacgtcttcatggtcccacagtatggatacctcaccctgaacaacgggagtcaggcggtaggacgctcttccttttactgcctggagtactttccttctcagatgcttcgtaccggaaacaactttaccttcagctacacctttgaagacgtgcctttccacagtagctacgctcacagccagagtctggatcggctgatgaatcctcttatcgaccagtacctgtattatctaaacaaaacacaatcaaatagtggaactcttcagcagtctcggctactgtttagtcaagctggacccaccagcatgtctcttcaagctaaaaactggctgcctggaccttgctacagacaacagcgtctgtcaaagcaggcaaacgacaacaacaacagcaactttccctggactgcggctacaaagtatcatctaaatggccgggactcgttggttaatccaggaccagctatggccagccacaaagacgatgaagaaaagtttttccccatgcatggaaccctgatatttggtaaacaaggaacaaatgctaacgacgcggatttggacaatgtcatgattacagatgaagaagaaatccgcaccaccaatcccgtggctacggagcagtacgggactgtgtcaaataatttgcaaaactcaaatactggtccaactactggaactgtcaatcaccaaggagcgttacctggtatggtgtggcaggatcgagacgtgtacctgcagggacccatttgggccaagattcctcacaccgatggacactttcatccttctccactgatgggaggttttggactcaaacacccgcctcctcagatcatgatcaaaaacactcccgttccagccaatcctcctacaaacttcagttctgccaagtttgcttccttcatcacacagtattccacgggacaagtcagcgtggagattgagtgggagctgcagaaggagaacagcaaacgctggaaccccgagatccagtacacttccaactacaacaaatctgttaatgtggactttactgtggacactaatggcgtgtattcagagcctcgccccattggcaccagatacctgactcgtaatctgtaa

SEQ ID NO: 13127 - DNA, 2208 bp, Artificial Sequence
  source: /note="Description of Artificial Sequence: Synthetic polynucleotide"
atggctgccgatggttatcttccagattggctcgaggacactctctctgaaggaataagacagtggtggaagctcaaacctggcccaccaccgccaaagcccgcagagcggcacaaggacgacagtaggggtcttgtgcttcctgggtacaagtacctcggacccttcaacggactcgacaaaggagagccggtcaacgaggcaggcgccgcggccctcgagcacgacaaggcctacgaccggcagctcgacagcggagacaacccgtacctcaagtacaaccacgccgacgcggagtttcaggagcgtcttaaagaagatacgtcttttgggggcaacctcggacgagcagtattccaggcgaaaaagagggttcttgaacctctgggcctggttgaggagcctgttaagacggctccgggaaaaaagaggccggtagagcactctcctgtggagccagactcctcctcgggaaccggaaaagcgggccagcagcctgcaagaaaaagattgaattttggtcagactggagacgcagactccgtacctgacccccagcctctcggacagccaccagcagcccccacaagtttgggatctactacaatggctacaggcagtggcgcaccaatggcagacaataacgagggtgccgatggagtgggtaattcctcaggaaattggcattgcgattcccaatggctgggcgacagagtcatcaccaccagcacccgaacctgggccctgcccacctacaacaaccacctctacaagcaaatctccagccaatcaggagcatcgaacgacaaccactactttggccacagcaccccttgggggtattttgacttcaacagattccactgtcacttctccccacgtgactggcaaagactcatcaacaacaactggggattccgacccaagagactcaacttcaagctctttaacattcaagtcaaagaggtcacgcagaatgacggtacgacgacgattgccaataaccttaccagcacggttcaggtgtttactgactcggagtaccagctcccgtacgtcctcggctcggcgcatcaaggatgcctcccgccgttcccagcagacgtcttcatggtcccacagtatggatacctcaccctgaacaacgggagtcaggcggtaggacgctcttccttttactgcctggagtactttccttctcagatgcttcgtaccggaaacaactttaccttcagctacacctttgaagacgtgcctttccacagtagctacgctcacagccagagtctggatcggctgatgaatcctcttatcgaccagtacctgtattatctaaacaaaacacaatcaaatagtggaactcttcagcagtctcggctactgtttagtcaagctggacccaccagcatgtctcttcaagctaaaaactggctgcctggaccttgctacagacaacagcgtctgtcaaagcaggcaaacgacaacaacaacagcaactttccctggactgcggctacaaagtatcatctaaatggccgggactcgttggttaatccaggaccagctatggccagccacaaagacgatgaagaaaagtttttccccatgcatggaaccctgatatttggtaaacaaggaacaaatgctaacgacgcggatttggacaatgtcatgattacagatgaagaagaaatccgcaccaccaatcccgtggctacggagcagtacgggactgtgtcaaataatttgcaaaactcaaatactggtccaactactggaactgtcaatcaccaaggagcgttacctggtatggtgtggcaggatcgagacgtgtacctgcagggacccatttgggccaagattcctcacaccgatggacactttcatccttctccactgatgggaggttttggactcaaacacccgcctcctcagatcatgatcaaaaacactcccgttccagccaatcctcctacaaacttcagttctgccaagtttgcttccttcatcacacagtattccacgggacaagtcagcgtggagattgagtgggagctgcagaaggagaacagcaaacgctggaaccccgagatccagtacacttccaactacaacaaatctgttaatgtggactttactgtggacactaatggcgtgtattcagagcctcgccccattggcaccagatacctgactcgtaatctgtaa

SEQ ID NO: 13128 - DNA, 2208 bp, Artificial Sequence
  source: /note="Description of Artificial Sequence: Synthetic polynucleotide"
atggctgccgatggttatcttccagattggctcgaggacactctctctgaaggaataagacagtggtggaagctcaaacctggcccaccaccgccaaagcccgcagagcggcacaaggacgacagtaggggtcttgtgcttcctgggtacaagtacctcggacccttcaacggactcgacaaaggagagccggtcaacggggcagacgccgcggccctcgagcacgacaaggcctacgaccggcagctcgacagcggagacaacccgtacctcaagtacaaccacgccgacgcggagtttcaggagcgtcttaaagaagatacgtcttttgggggcaacctcggacgagcagtattccaggcgaaaaagagggttcttgaacctctgggcctggttgaggagcctgttaagacggctccgggaaaaaagaggccggtagagcactctcctgtggagccagactcctcctcgggaaccggaaaagcgggccagcagcctgcaagaaaaagattgaattttggtcagactggagacgcagactccgtacctgacccccagcctctcggacagccaccagcagcccccacaagtttgggatctactacaatggctacaggcagtggcgcaccaatggcagacaataacgagggtgccgatggagtgggtaattcctcaggaaattggcattgcgattcccaatggctgggcgacagagtcatcaccaccagcacccgaacctgggccctgcccacctacaacaaccacctctacaagcaaatctccagccaatcaggagcatcgaacgacaaccactactttggccacagcaccccttgggggtattttgacttcaacagattccactgtcacttctccccacgtgactggcaaagactcatcaacaacaactggggattccgacccaagagactcaacttcaagctctttaacattcaagtcaaagaggtcacgcagaatgacggtacgacgacgattgccaataaccttaccagcacggttcaggtgtttactgactcggagtaccagctcccgtacgtcctcggctcggcgcatcaaggatgcctcccgccgttcccagcagacgtcttcatggtcccacagtatggatacctcaccctgaacaacgggagtcaggcggtaggacgctcttccttttactgcctggagtactttccttctcagatgcttcgtaccggaaacaactttaccttcagctacacctttgaagacgtgcctttccacagtagctacgctcacagccagagtctggatcggctgatgaatcctcttatcgaccagtacctgtattatctaaacaaaacacaatcaaatagtggaactcttcagcagtctcggctactgtttagtcaagctggacccaccagcatgtctcttcaagctaaaaactggctgcctggaccttgctacagacaacagcgtctgtcaaagcaggcaaacgacaacaacaacagcaactttccctggactgcggctacaaagtatcatctaaatggccgggactcgttggttaatccaggaccagctatggccagccacaaagacgatgaagaaaagtttttccccatgcatggaaccctgatatttggtaaacaaggaacaaatgctaacgacgcggatttggacaatgtcatgattacagatgaagaagaaatccgcaccaccaatcccgtggctacggagcagtacgggactgtgtcaaataatttgcaaaactcaaatactggtccaactactggaactgtcaatcaccaaggagcgttacctggtatggtgtggcaggatcgagacgtgtacctgcagggacccatttgggccaagattcctcacaccgatggacactttcatccttctccactgatgggaggttttggactcaaacacccgcctcctcagatcatgatcaaaaacactcccgttccagccaatcctcctacaaacttcagttctgccaagtttgcttccttcatcacacagtattccacgggacaagtcagcgtggagattgagtgggagctgcagaaggagaacagcaaacgctggaaccccgagatccagtacacttccaactacaacaaatctgttaatgtggactttactgtggacactaatggcgtgtattcagagcctcgccccattggcaccagatacctgactcgtaatctgtaa

SEQ ID NO: 13129 - DNA, 2208 bp, Artificial Sequence
  source: /note="Description of Artificial Sequence: Synthetic polynucleotide"
atggctgccgatggttatcttccagattggctcgaggacactctctctgaaggaataagacagtggtggaagctcaaacctggcccaccaccgccaaagcccgcagagcggcacaaggacgacagtaggggtcttgtgcttcctgggtacaagtacctcggacccttcaacggactcgacaaaggagagccggtcaacgaggcagacgccgcggccctcgagcacgacaaggcctacgaccggcagctcgacagcggagacaacccgtacctcaagtacaaccacgccgacgcggagtttcaggagcgtcttaaagaagatacgtcttttgggggcaacctcggacgagcagtattccaggcgaaaaagagggttcttgaacctctgggcctggttgaggagcctgttaagacggctccgggaaaaaagaggccggtagagcactctcctgtggagccagactcctcctcgggaaccggaaaagcgggccagcagcctgcaagaaaaagattgaattttggtcagactggagacgcagactccgtacctgacccccagcctctcggacagccaccagcagcccccacaagtttgggatctactacaatggctacaggcagtggcgcaccaatggcagacaataacgagggtgccgatggagtgggtaattcctcaggaaattggcattgcgattcccaatggctgggcgacagagtcatcaccaccagcacccgaacctgggccctgcccacctacaacaaccacctctacaagcaaatctccagccaatcaggagcatcgaacgacaaccactactttggccacagcaccccttgggggtattttgacttcaacagattccactgtcacttctccccacgtgactggcaaagactcatcaacaacaactggggattccgacccaagagactcaacttcaagctctttaacattcaagtcaaagaggtcacgcagaatgacggtacgacgacgattgccaataaccttaccagcacggttcaggtgtttactgactcggagtaccagctcccgtacgtcctcggctcggcgcatcaaggatgcctcccgccgttcccagcagacgtcttcatggtcccacagtatggatacctcaccctgaacaacgggagtcaggcggtaggacgctcttccctttactgcctggagtactttccttctcagatgcttcgtaccggaaacaactttaccttcagctacacctttgaagacgtgcctttccacagtagctacgctcacagccagagtctggatcggctgatgaatcctcttatcgaccagtacctgtattatctaaacaaaacacaatcaaatagtggaactcttcagcagtctcggctactgtttagtcaagctggacccaccagcatgtctcttcaagctaaaaactggctgcctggaccttgctacagacaacagcgtctgtcaaagcaggcaaacgacaacaacaacagcaactttccctggactgcggctacaaagtatcatctaaatggccgggactcgttggttaatccaggaccagctatggccagccacaaagacgatgaagaaaagtttttccccatgcatggaaccctgatatttggtaaacaaggaacaaatgctaacgacgcggatttggacaatgtcatgattacagatgaagaagaaatccgcaccaccaatcccgtggctacggagcagtacgggactgtgtcaaataatttgcaaaactcaaatactggtccaactactggaactgtcaatcaccaaggagcgttacctggtatggtgtggcaggatcgagacgtgtacctgcagggacccatttgggccaagattcctcacaccgatggacactttcatccttctccactgatgggaggttttggactcaaacacccgcctcctcagatcatgatcaaaaacactcccgttccagccaatcctcctacaaacttcagttctgccaagtttgcttccttcatcacacagtattccacgggacaagtcagcgtggagattgagtgggagctgcagaaggagaacagcaaacgctggaaccccgagatccagtacacttccaactacaacaaatctgttaatgtggactttactgtggacactaatggcgtgtattcagagcctcgccccattggcaccagatacctgactcgtaatctgtaa

SEQ ID NO: 13130 - DNA, 2208 bp, Artificial Sequence
  source: /note="Description of Artificial Sequence: Synthetic polynucleotide"
atggctgccgatggttatcttccagattggctcgaggacactctctctgaaggaataagacagtggtggaagctcaaacctggcccaccaccgccaaagcccgcagagcggcacaaggacgacagtaggggtcttgtgcttcctgggtacaagtacctcggacccttcaacggactcgacaaaggagagccggtcaacgaggcagacgccgcggccctcgagcacgacaaggcctacgaccggcagctcgacagcggagacaacccgtacctcaagtacaaccacgccgacgcggagtttcaggagcgtcttaaagaagatacgtcttttgggggcaacctcggacgagcagtattccaggcgaaaaagagggttcttgaacctctgggcctggttgaggagcctgttaagacggctccgggaaaaaagaggccggtagagcactctcctgtggagccagactcctcctcgggaaccggaaaagcgggccagcagcctgcaagaaaaagattgaattttggtcagactggagacgcagactccgtacctgacccccagcctctcggacagccaccagcagcccccacaagtttgggatctactacaatggctacaggcagtggcgcaccaatggcagacaataacgagggtgccgatggagtgggtaattcctcaggaaattggcattgcgattcccaatggctgggcgacagagtcatcaccaccagcacccgaacctgggccctgcccacctacaacaaccacctctacaagcaaatctccagccaatcaggagcatcgaacgacaaccactactttggccacagcaccccttgggggtattttgacttcaacagattccactgtcacttctccccacgtgactggcaaagactcatcaacaacaactggggattccgacccaagagactcaacttcaagctctttaacattcaagtcaaagaggtcacgcagaatgacggtacgacgacgattgccaataaccttaccagcacggttcaggtgtttactgactcggagtaccagctcccgtacgtcctcggctcggcgcatcaaggatgcctcccgccgttcccagcagacgtcttcatggtcccacagtatggatacctcaccctgaacaacgggagtcaggcggtaggacgctcttccttttactgcctggagtactttccttctcagatgcttcgtaccggaaacaactttacctccagctacacctttgaagacgtgcctttccacagtagctacgctcacagccagagtctggatcggctgatgaatcctcttatcgaccagtacctgtattatctaaacaaaacacaatcaaatagtggaactcttcagcagtctcggctactgtttagtcaagctggacccaccagcatgtctcttcaagctaaaaactggctgcctggaccttgctacagacaacagcgtctgtcaaagcaggcaaacgacaacaacaacagcaactttccctggactgcggctacaaagtatcatctaaatggccgggactcgttggttaatccaggaccagctatggccagccacaaagacgatgaagaaaagtttttccccatgcatggaaccctgatatttggtaaacaaggaacaaatgctaacgacgcggatttggacaatgtcatgattacagatgaagaagaaatccgcaccaccaatcccgtggctacggagcagtacgggactgtgtcaaataatttgcaaaactcaaatactggtccaactactggaactgtcaatcaccaaggagcgttacctggtatggtgtggcaggatcgagacgtgtacctgcagggacccatttgggccaagattcctcacaccgatggacactttcatccttctccactgatgggaggttttggactcaaacacccgcctcctcagatcatgatcaaaaacactcccgttccagccaatcctcctacaaacttcagttctgccaagtttgcttccttcatcacacagtattccacgggacaagtcagcgtggagattgagtgggagctgcagaaggagaacagcaaacgctggaaccccgagatccagtacacttccaactacaacaaatctgttaatgtggactttactgtggacactaatggcgtgtattcagagcctcgccccattggcaccagatacctgactcgtaatctgtaa

SEQ ID NO: 13131 - DNA, 2208 bp, Artificial Sequence
  source: /note="Description of Artificial Sequence: Synthetic polynucleotide"
atggctgccgatggttatcttccagattggctcgaggacactctctctgaaggaataagacagtggtggaagctcaaacctggcccaccaccgccaaagcccgcagagcggcacaaggacgacagtaggggtcttgtgcttcctgggtacaagtacctcggacccttcaacggactcgacaaaggagagccggtcaacgaggcagacgccgcggccctcgagcacgacaaggcctacgaccggcagctcgacagcggagacaacccgtacctcaagtacaaccacgccgacgcggagtttcaggagcgtcttaaagaagatacgtcttttgggggcaacctcggacgagcagtattccaggcgaaaaagagggttcttgaacctctgggcctggttgaggagcctgttaagacggctccgggaaaaaagaggccggtagagcactctcctgtggagccagactcctcctcgggaaccggaaaagcgggccagcagcctgcaagaaaaagattgaattttggtcagactggagacgcagactccgtacctgacccccagcctctcggacagccaccagcagcccccacaagtttgggatctactacaatggctacaggcagtggcgcaccaatggcagacaataacgagggtgccgatggagtgggtaattcctcaggaaattggcattgcgattcccaatggctgggcgacggagtcatcaccaccagcacccgaacctgggccctgcccacctacaacaaccacctctacaagcaaatctccagccaatcaggagcatcgaacgacaaccactactttggccacagcaccccttgggggtattttgacttcaacagattccactgtcacttctccccacgtgactggcaaagactcatcaacaacaactggggattccgacccaagagactcaacttcaagctctttaacattcaagtcaaagaggtcacgcagaatgacggtacgacgacgattgccaataaccttaccagcacggttcaggtgtttactgactcggagtaccagctcccgtacgtcctcggctcggcgcatcaaggatgcctcccgccgttcccagcagacgtcttcatggtcccacagtatggatacctcaccctgaacaacgggagtcaggcggtaggacgctcttccttttactgcctggagtactttccttctcagatgcttcgtaccggaaacaactttaccttcagctacacctttgaagacgtgcctttccacagtagctacgctcacagccagagtctggatcggctgatgaatcctcttatcgaccagtacctgtattatctaaacaaaacacaatcaaatagtggaactcttcagcagtctcggctactgtttagtcaagctggacccaccagcatgtctcttcaagctaaaaactggctgcctggaccttgctacagacaacagcgtctgtcaaagcaggcaaacgacaacaacaacagcaactttccctggactgcggctacaaagtatcatctaaatggccgggactcgttggttaatccaggaccagctatggccagccacaaagacgatgaagaaaagtttttccccatgcatggaaccctgatatttggtaaacaaggaacaaatgctaacgacgcggatttggacaatgtcatgattacagatgaagaagaaatccgcaccaccaatcccgtggctacggagcagtacgggactgtgtcaaataatttgcaaaactcaaatactggtccaactactggaactgtcaatcaccaaggagcgttacctggtatggtgtggcaggatcgagacgtgtacctgcagggacccatttgggccaagattcctcacaccgatggacactttcatccttctccactgatgggaggttttggactcaaacacccgcctcctcagatcatgatcaaaaacactcccgttccagccaatcctcctacaaacttcagttctgccaagtttgcttccttcatcacacagtattccacgggacaagtcagcgtggagattgagtgggagctgcagaaggagaacagcaaacgctggaaccccgagatccagtacacttccaactacaacaaatctgttaatgtggactttactgtggacactaatggcgtgtattcagagcctcgccccattggcaccagatacctgactcgtaatctgtaa

SEQ ID NO: 13132 - DNA, 2208 bp, Artificial Sequence
  source: /note="Description of Artificial Sequence: Synthetic polynucleotide"
atggctgccgatggttatcttccagattggctcgaggacactctctctgaaggaataagacagtggtggaagctcaaacctggcccaccaccgccaaagcccgcagagcggcacaaggacgacagtaggggtcttgtgcttcctgggtacaagtacctcggacccttcaacggactcgacaaaggagagccggtcaacgaggcagacgccgcggccctcgagcacgacaaggcctacgaccggcagctcgacagcggagacaacccgtacctcaagtacaaccacgccgacgcggagtttcaggagcgtcttaaagaagatacgtcttttgggggcaacctcggacgagcagtattccaggcgaaaaagagggttcttgaacctctgggcctggttgaggagcctgttaagacggctccgggaaaaaagaggccggtagagcactctcctgtggagccagactcctcctcgggaaccggaaaagcgggccagcagcctgcaagaaaaagattgaattttggtcagactggagacgcagactccgtacctgacccccagcctctcggacagccaccagcagcccccacaagtttgggatctactacaatggctacaggcagtggcgcaccaatggcagacaataacgagggtgccgatggagtgggtaattcctcaggaaattggcattgcgattcccaatggctgggcgacagagtcatcaccaccagcacccgaacctgggccctgcccacctacaacaaccacctctacaagcaaatctccagccaatcaggagcatcgaacgacaaccactactttggccacagcaccccttgggggtattttgacttcaacagattccactgtcacttctccccacgtgactggcaaagactcatcaacaacaactggggattccgacccaagagactcaacttcaagctctttaacattcaagtcaaagaggtcacgcagaatgacggtacgacgacgattgccaataaccttaccagcacggttcaggtgtttactgactcggagtaccagctcccgtacgtcctcggctcggcgcatcaaggatgcctcccgccgttcccagcagacgtcttcatggtcccacagtatggatacctcaccctgaacaacgggagtcaggcggtaggacgctcttccttttactgcctggagtactttccttctcagatgcttcgtaccggaaacaactttaccttcagctacacctttgaagacgtgcctttccacagtagctacgctcacagccagagtctggatcggctgatgaatcctcttatcgaccagtacctgtattatctaaacaaaacacaatcaaatagtggaactcttcagcagtctcggctactgtttagtcaagctggacccaccagcatgtctcttcaagctaaaaactggctgcctggaccttgctacagacaacagcgtctgtcaaagcaggcaaacgacaacaacaacagcaactttccctggactgcggctacaaagtatcatctaaatggccgggactcgttggttaatccaggaccagctatggccagccacaaagacgatgaagaaaagtttttccccatgcatggaaccctgatatttggtaaacaaggaacaaatgctaacgacgcggatttggacaatgtcatgattacagatgaagaagaaatccgcaccaccaatcccgtggctacggagcagtacaggactgtgtcaaataatttgcaaaactcaaatactggtccaactactggaactgtcaatcaccaaggagcgttacctggtatggtgtggcaggatcgagacgtgtacctgcagggacccatttgggccaagattcctcacaccgatggacactttcatccttctccactgatgggaggttttggactcaaacacccgcctcctcagatcatgatcaaaaacactcccgttccagccaatcctcctacaaacttcagttctgccaagtttgcttccttcatcacacagtattccacgggacaagtcagcgtggagattgagtgggagctgcagaaggagaacagcaaacgctggaaccccgagatccagtacacttccaactacaacaaatctgttaatgtggactttactgtggacactaatggcgtgtattcagagcctcgccccattggcaccagatacctgactcgtaatctgtaa

SEQ ID NO: 13133 - DNA, 2208 bp, Artificial Sequence
  source: /note="Description of Artificial Sequence: Synthetic polynucleotide"
atggctgccgatggttatcttccagattggctcgaggacactctctctgaaggaataagacagtggtggaagctcaaacctggcccaccaccgccaaagcccgcagagcggcacaaggacgacagtaggggtcttgtgcttcctgggtacaagtacctcggacccttcaacggactcgacaaaggagagccggtcaacgaggcagacgccgcggccctcgagcacgacaaggcctacgaccggcagctcgacagcggagacaacccgtacctcaagtacaaccacgccgacgcggagtttcaggagcgtcttaaagaagatacgtcttttgggggcaacctcggacgagcagtattccaggcgaaaaagagggttcttgaacctctgggcctggttgaggagcctgttaagacggctccgggaaaaaagaggccggtagagcactctcctgtggagccagactcctcctcgggaaccggaaaagcgggccagcagcctgcaagaaaaagattgaattttggtcagactggagacgcagactccgtacctgacccccagcctctcggacagccaccagcagcccccacaagtttgggatctactacaatggctacaggcagtggcgcaccaatggcagacaataacgagggtgccgatggagtgggtaattcctcaggaaattggcattgcgattcccaatggctgggcgacagagtcatcaccaccagcacccgaacctgggccctgcccacctacaacaaccacctctacaagcaaatctccagccaatcaggagcatcgaacgacaaccactactttggccacagcaccccttgggggtattttgacttcaacagattccactgtcacttctccccacgtgactggcaaagactcatcaacaacaactggggattccgacccaagagactcaacttcaagctctttaacattcaagtcaaagaggtcacgcagaatgacggtacgacgacgattgccaataaccttaccagcacggttcgggtgtttactgactcggagtaccagctcccgtacgtcctcggctcggcgcatcaaggatgcctcccgccgttcccagcagacgtcttcatggtcccacagtatggatacctcaccctgaacaacgggagtcaggcggtaggacgctcttccttttactgcctggagtactttccttctcagatgcttcgtaccggaaacaactttaccttcagctacacctttgaagacgtgcctttccacagtagctacgctcacagccagagtctggatcggctgatgaatcctcttatcgaccagtacctgtattatctaaacaaaacacaatcaaatagtggaactcttcagcagtctcggctactgtttagtcaagctggacccaccagcatgtctcttcaagctaaaaactggctgcctggaccttgctacagacaacagcgtctgtcaaagcaggcaaacgacaacaacaacagcaactttccctggactgcggctacaaagtatcatctaaatggccgggactcgttggttaatccaggaccagctatggccagccacaaagacgatgaagaaaagtttttccccatgcatggaaccctgatatttggtaaacaaggaacaaatgctaacgacgcggatttggacaatgtcatgattacagatgaagaagaaatccgcaccaccaatcccgtggctacggagcagtacgggactgtgtcaaataatttgcaaaactcaaatactggtccaactactggaactgtcaatcaccaaggagcgttacctggtatggtgtggcaggatcgagacgtgtacctgcagggacccatttgggccaagattcctcacaccgatggacactttcatccttctccactgatgggaggttttggactcaaacacccgcctcctcagatcatgatcaaaaacactcccgttccagccaatcctcctacaaacttcagttctgccaagtttgcttccttcatcacacagtattccacgggacaagtcagcgtggagattgagtgggagctgcagaaggagaacagcaaacgctggaaccccgagatccagtacacttccaactacaacaaatctgttaatgtggactttactgtggacactaatggcgtgtattcagagcctcgccccattggcaccagatacctgactcgtaatctgtaa

SEQ ID NO: 13134 - DNA, 2208 bp, Artificial Sequence
  source: /note="Description of Artificial Sequence: Synthetic polynucleotide"
atggctgccgatggttatcttccagattggctcgaggacactctctctgaaggaataagacagtggtggaagctcaaacctggcccaccaccgccaaagcccgcagagcggcacaaggacgacagtaggggtcttgtgcttcctgggtacaagtacctcggacccttcaacggactcgacaaaggagagccggtcaacgaggcagacgccgcggccctcgagcacgacaaggcctacgaccggcagctcgacagcggagacaacccgtacctcaagtacaaccacgccgacgcggagtttcaggagcgtcttaaagaagatacgtcttttgggggcaacctcggacgagcagtattccaggcgaaaaagagggttcttgaacctctgggcctggttgaggagcctgttaagacggctccgggaaaaaagaggccggtagagcactctcctgtggagccagactcctcctcgggaaccggaaaagcgggccagcagcctgcaagaaaaagattgaattttggtcagactggagacgcagactccgtacctgacccccagcctctcggacagccaccagcagcccccacaagtttgggatctactacaatggctacaggcagtggcgcaccaatggcagacaataacgagggtgccgatggagtgggtaattcctcaggaaattggcattgcgattcccaatggctgggcgacagagtcatcaccaccagcacccgaacctgggccctgcccacctacaacaaccacctctacaagcaaatctccagccaatcaggagcatcgaacgacaaccactactttggccacagcaccccttgggggtattttgacttcaacagattccactgtcacttctccccacgtgactggcaaagactcatcaacaacaactggggattccgacccaagagactcaacttcaagctctttaacattcaagtcaaagaggtcacgcagaatgacggtacgacgacgattgccaataaccttaccagcacggttcaggtgtttactgactcggagtaccagctcccgtacgtcctcggctcggcgcatcaaggatgcctcccgccgttcccagcagacgtcttcatggtcccacagtatggatacctcaccctgaacaacgggagtcaggcggtaggacgctcttccttttactgcctggagtactttccttctcagatgcttcgtaccggaaacaactttaccttcagctacacctttgaagacgtgcctttccacagtagctacgctcacagccagagtctggatcggctgatgaatcctcttatcgaccagtacctgtattatctaaacaaaacacaatcaaatagtggaactcttcggcagtctcggctactgtttagtcaagctggacccaccagcatgtctcttcaagctaaaaactggctgcctggaccttgctacagacaacagcgtctgtcaaagcaggcaaacgacaacaacaacagcaactttccctggactgcggctacaaagtatcatctaaatggccgggactcgttggttaatccaggaccagctatggccagccacaaagacgatgaagaaaagtttttccccatgcatggaaccctgatatttggtaaacaaggaacaaatgctaacgacgcggatttggacaatgtcatgattacagatgaagaagaaatccgcaccaccaatcccgtggctacggagcagtacgggactgtgtcaaataatttgcaaaactcaaatactggtccaactactggaactgtcaatcaccaaggagcgttacctggtatggtgtggcaggatcgagacgtgtacctgcagggacccatttgggccaagattcctcacaccgatggacactttcatccttctccactgatgggaggttttggactcaaacacccgcctcctcagatcatgatcaaaaacactcccgttccagccaatcctcctacaaacttcagttctgccaagtttgcttccttcatcacacagtattccacgggacaagtcagcgtggagattgagtgggagctgcagaaggagaacagcaaacgctggaaccccgagatccagtacacttccaactacaacaaatctgttaatgtggactttactgtggacactaatggcgtgtattcagagcctcgccccattggcaccagatacctgactcgtaatctgtaa

SEQ ID NO: 13135 - DNA, 2208 bp, Artificial Sequence
  source: /note="Description of Artificial Sequence: Synthetic polynucleotide"
atggctgccgatggttatcttccagattggctcgaggacactctctctgaaggaataagacagtggtggaagctcaaacctggcccaccaccgccaaagcccgcagagcggcacaaggacgacagtaggggtcttgtgcttcctgggtacaagtacctcggacccttcaacggactcgacaaaggagagccggtcaacgaggcagacgccgcggccctcgagcacgacaaggcctacgaccggcagctcgacagcggagacaacccgtacctcaagtacaaccacgccgacgcggagtttcaggagcgtcttaaagaagatacgtcttttgggggcaacctcggacgagcagtattccaggcgaaaaagagggttcttgaacctctgggcctggttgaggagcctgttaagacggctccgggaaaaaagaggccggtagagcactctcctgtggagccagactcctcctcgggaaccggaaaagcgggccagcagcctgcaagaaaaagattgaattttggtcagactggagacgcagactccgtacctgacccccagcctctcggacagccaccagcagcccccacaagtttgggatctactacaatggctacaggcagtggcgcaccaatggcagacaataacgagggtgccgatggagtgggtaattcctcaggaaattggcattgcgattcccaatggctgggcgacagagtcatcaccaccagcacccgaacctgggccctgcccacctacaacaaccacctctacaagcaaatctccagccaatcaggagcatcgaacgacaaccactactttggccacagcaccccttgggggtattttgacttcaacagattccactgtcacttctccccacgtgactggcaaagactcatcaacaacaactggggattccgacccaagagactcaacttcaagctctttaacattcaagtcaaagaggtcacgcagaatgacggtacgacgacgattgccaataaccttaccagcacggttcaggtgtttactgactcggagtaccagctcccgtacgtcctcggctcggcgcatcaaggatgcctcccgccgttcccagcagacgtcttcatggtcccacagtatggatacctcaccctgaacaacgggagtcaggcggtaggacgctcttccttttactgcctggagtactttccttctcagatgcttcgtaccggaaacaactttaccttcagctacacctttgaagacgtgcctttccacagtagctacgctcacagccagagtctggatcggctgatgaatcctcttatcgaccagtacctgtattatctaaacaaaacacaatcaaatagtggaactcttcagcagtctcggctactgtttagtcaagctggacccaccagcatgtctcttcaagctaaaaactggctgcctggaccttgctacagacaacagcgtctgtcaaagcaggcaaacgacaacaacaacagcaactttccctggactgcggctacaaagtatcatctaaatggccgggactcgttggttaatccaggaccagctatggccagccacaaagacgatgaagaaaagtttttccccatgcatggaaccctgatatttggtaaacaaggaacaaatgctaacgacgcggatttggacaatgtcatgattacagatgaagaagaaatccgcaccaccaatcccgtggctacggagcagtacgggactgtgtcaaataatttgcaaaactcaaatactggtccaactactggaactgtcaatcgccaaggagcgttacctggtatggtgtggcaggatcgagacgtgtacctgcagggacccatttgggccaagattcctcacaccgatggacactttcatccttctccactgatgggaggttttggactcaaacacccgcctcctcagatcatgatcaaaaacactcccgttccagccaatcctcctacaaacttcagttctgccaagtttgcttccttcatcacacagtattccacgggacaagtcagcgtggagattgagtgggagctgcagaaggagaacagcaaacgctggaaccccgagatccagtacacttccaactacaacaaatctgttaatgtggactttactgtggacactaatggcgtgtattcagagcctcgccccattggcaccagatacctgactcgtaatctgtaa

SEQ ID NO: 13136 - DNA, 2208 bp, Artificial Sequence
  source: /note="Description of Artificial Sequence: Synthetic polynucleotide"
atggctgccgatggttatcttccagattggctcgaggacactctctctgaaggaataagacagtggtggaagctcaaacctggcccaccaccgccaaagcccgcagagcggcacaaggacgacagtaggggtcttgtgcttcctgggtacaagtacctcggacccttcaacggactcgacaaaggagagccggtcaacgaggcagacgccgcggccctcgagcacgacaaggcctacgaccggcagctcgacagcggagacaacccgtacctcaagtacaaccacgccgacgcggagtttcaggagcgtcttaaagaagatacgtcttttgggggcaacctcggacgagcagtattccaggcgaaaaagagggttcttgaacctctgggcctggttgaggagcctgttaagacggctccgggaaaaaagaggccggtagagcactctcctgtggagccagactcctcctcgggaaccggaaaagcgggccagcagcctgcaagaaaaagattgaattttggtcagactggagacgcagactccgtacctgacccccagcctctcggacagccaccagcagcccccacaagtttgggatctactacaatggctacaggcagtggcgcaccaatggcagacaataacgagggtgccgatggagtgggtaattcctcaggaaattggcattgcgattcccaatggctgggcgacagagtcatcaccaccagcacccgaacctgggccctgcccacctacaacaaccacctctacaagcaaatctccagccaatcaggagcatcgaacgacaaccactactttggccacagcaccccttgggggtattttgacttcaacagattccactgtcacttctccccacgtgactggcaaagactcatcaacaacaactggggattccgacccaagagactcaacttcaagctctttaacattcaagtcaaagaggtcacgcagaatgacggtacgacgacgattgccaataaccttaccagcacggttcaggtgtttactgactcggagtaccagctcccgtacgtcctcggctcggcgcatcaaggatgcctcccgccgttcccagcagacgtcttcatggtcccacagtatggatacctcaccctgaacaacgggagtcaggcggtaggacgctcttccttttactgcctggagtactttccttctcagatgcttcgtaccggaaacaactttaccttcagctacacctttgaagacgtgcctttccacagtagctacgctcacagccagagtctggatcggctgatgaatcctcttatcgaccagtacctgtattatctaaacaaaacacaatcaaatagtggaactcttcagcagtctcggctactgtttagtcaagctggacccaccagcatgtctcttcaagctaaaaactggctgcctggaccttgctacagacaacagcgtctgtcaaagcaggcaaacgacaacaacaacggcaactttccctggactgcggctacaaagtatcatctaaatggccgggactcgttggttaatccaggaccagctatggccagccacaaagacgatgaagaaaagtttttccccatgcatggaaccctgatatttggtaaacaaggaacaaatgctaacgacgcggatttggacaatgtcatgattacagatgaagaagaaatccgcaccaccaatcccgtggctacggagcagtacgggactgtgtcaaataatttgcaaaactcaaatactggtccaactactggaactgtcaatcaccaaggagcgttacctggtatggtgtggcaggatcgagacgtgtacctgcagggacccatttgggccaagattcctcacaccgatggacactttcatccttctccactgatgggaggttttggactcaaacacccgcctcctcagatcatgatcaaaaacactcccgttccagccaatcctcctacaaacttcagttctgccaagtttgcttccttcatcacacagtattccacgggacaagtcagcgtggagattgagtgggagctgcagaaggagaacagcaaacgctggaaccccgagatccagtacacttccaactacaacaaatctgttaatgtggactttactgtggacactaatggcgtgtattcagagcctcgccccattggcaccagatacctgactcgtaatctgtaa

SEQ ID NO: 13137 - DNA, 2208 bp, Artificial Sequence
  source: /note="Description of Artificial Sequence: Synthetic polynucleotide"
atggctgccgatggttatcttccagattggctcgaggacactctctctgaaggaataagacagtggtggaagctcaaacctggcccaccaccgccaaagcccgcagagcggcacaaggacgacagtaggggtcttgtgcttcctgggtacaagtacctcggacccttcaacggactcgacaaaggagagccggtcaacgaggcagacgccgcggccctcgagcacgacaaggcctacgaccggcagctcgacagcggagacaacccgtacctcaagtacaaccacgccgacgcggagtttcaggagcgtcttaaagaagatacgtcttttgggggcaacctcggacgagcagtattccaggcgaaaaagagggttcttgaacctctgggcctggttgaggagcctgttaagacggctccgggaaaaaagaggccggtagagcactctcctgtggagccagactcctcctcgggaaccggaaaagcgggccagcagcctgcaagaaaaagattgaattttggtcagactggagacgcagactccgtacctgacccccagcctctcggacagccaccagcagcccccacaagtttgggatctactacaatggctacaggcagtggcgcaccaatggcagacaataacgagggtgccgatggagtgggtaattcctcaggaaattggcattgcgattcccaatggctgggcgacagagtcatcaccaccagcacccgaacctgggccctgcccacctacaacaaccacctctacaagcaaatctccagccaatcaggagcatcgaacgacaaccactactttggccacagcaccccttgggggtattttgacttcaacagattccactgtcacttctccccacgtgactggcaaagactcatcaacaacaactggggattccgacccaagagactcaacttcaagctctttaacattcaagtcaaagaggtcacgcagaatgacggtacgacgacgattgccaataaccttaccagcacggttcaggtgtttactgactcggagtaccagctcccgtacgtcctcggctcggcgcatcaaggatgcctcccgccgttcccagcagacgtcttcatggtcccacagtatggatacctcaccctgaacaacgggagtcaggcggtaggacgctcttccttttactgcctggagtactttccttctcagatgcttcgtaccggaaacaactttaccttcagctacacctttgaagacgtgcctttccacagtagctacgctcacagccagagtctggatcggctgatgaatcctcttatcgaccagtacctgtattatctaaacaaaacacaatcaaatagtggaactcttcagcagtctcggctactgtttagtcaagctggacccaccagcatgtctcttcaagctaaaaactggctgcctggaccttgctacagacaacagcgtctgtcaaagcaggcaaacgacaacaacaacagcaactttccctggactgcggctacaaagtatcatctaaatggccgggactcgttggttaatccaggaccagctatggccagccacaaagacgatgaagaaaagtttttccccatgcatggaaccctgatatttggtaaacaaggaacaaatgctaacgacgcggatttggacaatgtcatgattacagatgaagaagaaatccgcaccaccaatcccgtggctacggagcagtacgggactgtgtcaaataatttgcaaaactcaaatactggtccaactactggaactgtcaatcaccaaggagcgttacctggtatggtgtggcaggatcgagacgtgtacctgcagggacccatttgggccaagattcctcacaccgatggacactttcatccttctccactgatgggaggttttggactcaaacacccgcctcctcagatcatgatcaaaaacactcccgttccagccaatcctcctacaaacttcagttctgccaagtttgcttccttcatcacacagtattccacgggacaagtcagcgtggagattgagtgggagctgcagaaggagaacggcaaacgctggaaccccgagatccagtacacttccaactacaacaaatctgttaatgtggactttactgtggacactaatggcgtgtattcagagcctcgccccattggcaccagatacctgactcgtaatctgtaa

SEQ ID NO: 13138 - DNA, 2208 bp, Artificial Sequence
  source: /note="Description of Artificial Sequence: Synthetic polynucleotide"
atggctgccgatggttatcttccagattggctcgaggacgctctctctgaaggaataagacagtggtggaagctcaaacctggcccaccaccgccaaagcccgcagagcggcacaaggacgacagtaggggtcttgtgcttcctgggtacaagtacctcggacccttcaacggactcgacaaaggagagccggtcaacgaggcagacgccgcggccctcgagcacgacaaggcctacgaccggcagctcgacagcggagacaacccgtacctcaagtacaaccacgccgacgcggagtttcaggagcgtcttaaagaagatacgtcttttgggggcaacctcggacgagcagtattccaggcgaaaaagagggttcttgaacctctgggcctggttgaggagcctgttaagacggctccgggaaaaaagaggccggtagagcactctcctgtggagccagactcctcctcgggaaccggaaaagcgggccagcagcctgcaagaaaaagattgaattttggtcagactggagacgcagactccgtacctgacccccagcctctcggacagccaccagcagcccccacaagtttgggatctactacaatggctacaggcagtggcgcaccaatggcagacaataacgagggtgccgatggagtgggtaattcctcaggaaattggcattgcgattcccaatggctgggcgacagagtcatcaccaccagcacccgaacctgggccctgcccacctacaacaaccacctctacaagcaaatctccagccaatcaggagcatcgaacgacaaccactactttggccacagcaccccttgggggtattttgacttcaacagattccactgtcacttctccccacgtgactggcaaagactcatcaacaacaactggggattccgacccaagagactcaacttcaagctctttaacattcaagtcaaagaggtcacgcagaatgacggtacgacgacgattgccaataaccttaccagcacggttcaggtgtttactgactcggagtaccagctcccgtacgtcctcggctcggcgcatcaaggatgcctcccgccgttcccagcagacgtcttcatggtcccacagtatggatacctcaccctgaacaacgggagtcaggcggtaggacgctcttccttttactgcctggagtactttccttctcagatgcttcgtaccggaaacaactttaccttcagctacacctttgaagacgtgcctttccacagtagctacgctcacagccagagtctggatcggctgatgaatcctcttatcgaccagtacctgtattatctaaacaaaacacaatcaaatagtggaactcttcagcagtctcggctactgtttagtcaagctggacccaccagcatgtctcttcaagctaaaaactggctgcctggaccttgctacagacaacagcgtctgtcaaagcaggcaaacgacaacaacaacagcaactttccctggactgcggctacaaagtatcatctaaatggccgggactcgttggttaatccaggaccagctatggccagccacaaagacgatgaagaaaagtttttccccatgcatggaaccctgatatttggtaaacaaggaacaaatgctaacgacgcggatttggacaatgtcatgattacagatgaagaagaaatccgcaccaccaatcccgtggctacggagcagtacgggactgtgtcaaataatttgcaaaactcaaatactggtccaactactggaactgtcaatcaccaaggagcgttacctggtatggtgtggcaggatcgagacgtgtacctgcagggacccatttgggccaagattcctcacaccgatggacactttcatccttctccactgatgggaggttttggactcaaacacccgcctcctcagatcatgatcaaaaacactcccgttccagccaatcctcctacaaacttcagttctgccaagtttgcttccttcatcacacagtattccacgggacaagtcagcgtggagattgagtgggagctgcagaaggagaacagcaaacgctggaaccccgagatccagtacacttccaactacaacaaatctgttaatgtggactttactgtggacactaatggcgtgtattcagagcctcgccccattggcaccagatacctgactcgtaatctgtaa

SEQ ID NO: 13139 - DNA, 2208 bp, Artificial Sequence
  source: /note="Description of Artificial Sequence: Synthetic polynucleotide"
atggctgccgatggttatcttccagattggctcgaggacactctctctgaaggaataagacagtggtggaagctcaaacctggcccaccaccgccaaagcccgcagagcggcacaaggacgacagtaggggtcttgtgcttcctgggtacaagtacctcggacccttcaacggactcgacaaaggagagccggtcaacgaggcagacgccgcggccctcgagcacgacaaggcctacgaccggcagctcgacagcggagacaacccgtacctcaagtacaaccacgccgacgcggagtttcaggagcgtcttaaagaagatacgccttttgggggcaacctcggacgagcagtattccaggcgaaaaagagggttcttgaacctctgggcctggttgaggagcctgttaagacggctccgggaaaaaagaggccggtagagcactctcctgtggagccagactcctcctcgggaaccggaaaagcgggccagcagcctgcaagaaaaagattgaattttggtcagactggagacgcagactccgtacctgacccccagcctctcggacagccaccagcagcccccacaagtttgggatctactacaatggctacaggcagtggcgcaccaatggcagacaataacgagggtgccgatggagtgggtaattcctcaggaaattggcattgcgattcccaatggctgggcgacagagtcatcaccaccagcacccgaacctgggccctgcccacctacaacaaccacctctacaagcaaatctccagccaatcaggagcatcgaacgacaaccactactttggccacagcaccccttgggggtattttgacttcaacagattccactgtcacttctccccacgtgactggcaaagactcatcaacaacaactggggattccgacccaagagactcaacttcaagctctttaacattcaagtcaaagaggtcacgcagaatgacggtacgacgacgattgccaataaccttaccagcacggttcaggtgtttactgactcggagtaccagctcccgtacgtcctcggctcggcgcatcaaggatgcctcccgccgttcccagcagacgtcttcatggtcccacagtatggatacctcaccctgaacaacgggagtcaggcggtaggacgctcttccttttactgcctggagtactttccttctcagatgcttcgtaccggaaacaactttaccttcagctacacctttgaagacgtgcctttccacagtagctacgctcacagccagagtctggatcggctgatgaatcctcttatcgaccagtacctgtattatctaaacaaaacacaatcaaatagtggaactcttcagcagtctcggctactgtttagtcaagctggacccaccagcatgtctcttcaagctaaaaactggctgcctggaccttgctacagacaacagcgtctgtcaaagcaggcaaacgacaacaacaacagcaactttccctggactgcggctacaaagtatcatctaaatggccgggactcgttggttaatccaggaccagctatggccagccacaaagacgatgaagaaaagtttttccccatgcatggaaccctgatatttggtaaacaaggaacaaatgctaacgacgcggatttggacaatgtcatgattacagatgaagaagaaatccgcaccaccaatcccgtggctacggagcagtacgggactgtgtcaaataatttgcaaaactcaaatactggtccaactactggaactgtcaatcaccaaggagcgttacctggtatggtgtggcaggatcgagacgtgtacctgcagggacccatttgggccaagattcctcacaccgatggacactttcatccttctccactgatgggaggttttggactcaaacacccgcctcctcagatcatgatcaaaaacactcccgttccagccaatcctcctacaaacttcagttctgccaagtttgcttccttcatcacacagtattccacgggacaagtcagcgtggagattgagtgggagctgcagaaggagaacagcaaacgctggaaccccgagatccagtacacttccaactacaacaaatctgttaatgtggactttactgtggacactaatggcgtgtattcagagcctcgccccattggcaccagatacctgactcgtaatctgtaa

SEQ ID NO: 13140 - protein, 743 aa, Artificial Sequence
  source: /note="Description of Artificial Sequence: Synthetic polypeptide"
MAADGYLPDWLEDNLSEGIREWWALKPGAPQPKANQQHQDNARGLVLPGYKYLGPGNGLDKGEPVNAADAAALEHDKAYDQQLKAGDNPYLKYNHADAEFQERLKEDTSFGGNLGRAVFQAKKRLLEPLGLVEEAAKTAPGKKRPVEQSPQEPDSSAGIGKSGAQPAKKRLNFGQTGDTESVPDPQPIGEPPAAPSGVGSLTMASGGGAPVADNNEGADGVGSSSGNWHCDSQWLGDRVITTSTRTWALPTYNNHLYKQISNSTSGGSSNDNAYFGYSTPWGYFDFNRFHCHFSPRDWQRLINNNWGFRPKRLNFKLFNIQVKEVTDNNGVKTIANNLTSTVQVFTDSDYQLPYVLGSAHEGCLPPFPADVFMIPQYGYLTLNDGSQAVGRSSFYCLEYFPSQMLRTGNNFQFSYEFENVPFHSSYAHSQSLDRLMNPLIDQYLYYLSKTINGSGQNQQTLKFSVAGPSNMAVQGRNYIPGPSYRQQRVSTTVTQNNNSEFAWPGASSWALNGRNSLMNPGPAMASHKEGEDRFFPLSGSLIFGKQGTGRDNVDADKVMITNEEEIKTTNPVATESYGQVATNHQSAQTLAVPFKAQAQTGWVQNQGILPGMVWQDRDVYLQGPIWAKIPHTDGNFHPSPLMGGFGMKHPPPQILIKNTPVPADPPTAFNKDKLNSFITQYSTGQVSVEIEWELQKENSKRWNPEIQYTSNYYKSNNVEFAVNTEGVYSEPRPIGTRYLTRNL

SEQ ID NO: 13141 - protein, 5 aa, Artificial Sequence
  source: /note="Description of Artificial Sequence: Synthetic peptide"
GGGGS

SEQ ID NO: 13142 - protein, 6 aa, Artificial Sequence
  source: /note="Description of Artificial Sequence: Synthetic peptide"
SGGGGS

SEQ ID NO: 13143 - protein, 15 aa, Artificial Sequence
  source: /note="Description of Artificial Sequence: Synthetic peptide"
GGGGSGGGGSGGGGS

SEQ ID NO: 13144 - protein, 25 aa, Artificial Sequence
  source: /note="Description of Artificial Sequence: Synthetic peptide"
GGGGSGGGGSGGGGSGGGGSGGGGS

SEQ ID NO: 13145 - protein, 10 aa, Artificial Sequence
  source: /note="Description of Artificial Sequence: Synthetic peptide"
GGGGSGGGGS

SEQ ID NO: 13146 - protein, 20 aa, Artificial Sequence
  source: /note="Description of Artificial Sequence: Synthetic peptide"
GGGGSGGGGSGGGGSGGGGS

SEQ ID NO: 13147 - protein, 30 aa, Artificial Sequence
  source: /note="Description of Artificial Sequence: Synthetic polypeptide"
GGGGSGGGGSGGGGSGGGGSGGGGSGGGGS

SEQ ID NO: 13148 - protein, 40 aa, Artificial Sequence
  source: /note="Description of Artificial Sequence: Synthetic polypeptide"
GGGGSGGGGSGGGGSGGGGSGGGGSGGGGSGGGGSGGGGS

SEQ ID NO: 13149 - DNA, 11 bp, Artificial Sequence
  source: /note="Description of Artificial Sequence: Synthetic oligonucleotide"
gaggagccacc

SEQ ID NO: 13150 - protein, 50 aa, Artificial Sequence
  source: /note="Description of Artificial Sequence: Synthetic polypeptide"
  SITE (1)..(50): /note="This sequence may encompass 1-10 'Gly Gly Gly Gly Ser' repeating units"
GGGGSGGGGSGGGGSGGGGSGGGGSGGGGSGGGGSGGGGSGGGGSGGGGS

SEQ ID NO: 13151 - DNA, 198 bp, Artificial Sequence
  source: /note="Description of Artificial Sequence: Synthetic polynucleotide"
gagctcaaaaccccacttggtgacacaactcacacatgcccacggtgcccagagcccaaatcttgtgacacacctcccccgtgcccacggtgcccagagcccaaatcttgtgacacaactcacacatgcccacggtgcccagagcccaaatcttgtgacacacctcccccgtgcccaaggtgcccagcacctgaactc

SEQ ID NO: 13152 - DNA, 15 bp, Artificial Sequence
  source: /note="Description of Artificial Sequence: Synthetic polynucleotide"
ggtggtggtggatcc

SEQ ID NO: 13153 - DNA, 30 bp, Artificial Sequence
  source: /note="Description of Artificial Sequence: Synthetic polynucleotide"
ggtggtggtggatccggtggtggtggatcc

SEQ ID NO: 13154 - DNA, 45 bp, Artificial Sequence
  source: /note="Description of Artificial Sequence: Synthetic polynucleotide"
ggtggtggtggatccggtggtggtggatccggtggtggtggatcc

SEQ ID NO: 13155 - DNA, 60 bp, Artificial Sequence
  source: /note="Description of Artificial Sequence: Synthetic polynucleotide"
ggtggtggtggatccggtggtggtggatccggtggtggtggatccggtggtggtggatcc

SEQ ID NO: 13156 - DNA, 75 bp, Artificial Sequence
  source: /note="Description of Artificial Sequence: Synthetic polynucleotide"
ggtggtggtggtagcggcggcggcggctctggtggtggtggatccggtggtggtggatccggtggtggtggatcc

SEQ ID NO: 13157 - DNA, 75 bp, Artificial Sequence
  source: /note="Description of Artificial Sequence: Synthetic polynucleotide"
ggtggtggtggatccggtggtggtggatccggtggtggtggatccggtggtggtggatccggtggtggtggatcc

SEQ ID NO: 13158 - DNA, 90 bp, Artificial Sequence
  source: /note="Description of Artificial Sequence: Synthetic polynucleotide"
ggtggtggtggtagcggcggcggcggctctggtggtggtggatccggtggtggtggatccggtggtggtggatccggtggtggtggatcc

SEQ ID NO: 13159 - DNA, 120 bp, Artificial Sequence
  source: /note="Description of Artificial Sequence: Synthetic polynucleotide"
ggtggtggtggtagcggcggcggcggctctggtggtggtggatccggtggtggtggatccggtggtggtggatccggtggtggtggatccggtggtggtggatccggtggtggtggatcc

SEQ ID NO: 13160 - DNA, 120 bp, Artificial Sequence
  source: /note="Description of Artificial Sequence: Synthetic polynucleotide"
ggtggtggtggatccggtggtggtggatccggtggtggtggatccggtggtggtggatccggtggtggtggatccggtggtggtggatccggtggtggtggatccggtggtggtggatcc

SEQ ID NO: 13161 - DNA, 60 bp, Artificial Sequence
  source: /note="Description of Artificial Sequence: Synthetic polynucleotide"
ggtggtggtggtagcggcggcggcggctctggtggtggtggatccggtggtggtggatcc

SEQ ID NO: 13162 - DNA, 90 bp, Artificial Sequence
  source: /note="Description of Artificial Sequence: Synthetic polynucleotide"
ggtggtggtggatccggtggtggtggatccggtggtggtggatccggtggtggtggatccggtggtggtggatccggtggtggtggatcc

SEQ ID NO: 13163 - protein, 4 aa, Unknown
  source: /note="Description of Unknown: 'KDEL' ER retention motif"
KDEL

SEQ ID NO: 13164 - protein, 6 aa, Unknown
  source: /note="Description of Unknown: 'SEKDEL' ER retention motif"
SEKDEL

SEQ ID NO: 13165 - protein, 112 aa, Artificial Sequence
  source: /note="Description of Artificial Sequence: Synthetic polypeptide"
EVQLQQSGADLVRPGALVKLSCKASGFNIKDYYLHWVRQRPEQGLEWIGWIDPENGDTVYDPKFQGKATITADTSSNTAYLQLGSLTSEDTAVYFCSTLDFWGQGTTLTVSS

SEQ ID NO: 13166 - protein, 113 aa, Artificial Sequence
  source: /note="Description of Artificial Sequence: Synthetic polypeptide"
DVVMTQTPLTLSVTIGQPASISCKSSQSLLDSDGKTYLNWLLQRPGQSPKRLIYLVSKLDSGVPDRFTGSGSGTDFTLKISRVEAEDLGVYYCWQGTHFPYTFGGGTKLEIKR

SEQ ID NO: 13167 - protein, 112 aa, Artificial Sequence
  source: /note="Description of Artificial Sequence: Synthetic polypeptide"
EVQLVQSGAEVVRPGALVKVSCKASGFNIKDYYLHWVRQAPEQGLEWIGWIDPENGDTVYDPKFQGKATITADTSTNTAYLQLSSLTSEDTAVYFCSTLDFWGQGTLVTVSS

SEQ ID NO: 13168 - protein, 112 aa, Artificial Sequence
  source: /note="Description of Artificial Sequence: Synthetic polypeptide"
EVQLVQSGAEVKKPGASVKVSCKVSGFNIKDYYLHWVRQAPEQGLEWMGWIDPENGDTVYDPKFQGRVTITADTSTNTAYMELSSLTSEDTAVYYCSTLDFWGQGTLVTVSS

SEQ ID NO: 13169 - protein, 112 aa, Artificial Sequence
  source: /note="Description of Artificial Sequence: Synthetic polypeptide"
EVQLVQSGAEVVRPGALVKISCKASGFNIKDYYLHWVRQRPEQGLEWIGWIDPENGDTVYDPKFQGKATITADTSTNTAYLQLGSLTSEDTAVYFCSTLDFWGQGTLVTVSS

SEQ ID NO: 13170 - protein, 112 aa, Artificial Sequence
  source: /note="Description of Artificial Sequence: Synthetic polypeptide"
EVQLVQSGAEVVKPGATVKISCKASGFNIKDYYLHWVRQRPGQGLEWIGWIDPENGDTVYDPKFQGRATITADTSTDTAYLQLGSLTSEDTAVYFCSTLDFWGQGTLVTVSS

SEQ ID NO: 13171 - protein, 112 aa, Artificial Sequence
  source: /note="Description of Artificial Sequence: Synthetic polypeptide"
EVQLVQSGAEVVKPGATVKISCKASGFTIKDYYLHWVRQRPGQGLEWIGWIDPEDGDTVYAPKFQGRATITADTSTDTAYLQLGSLTSEDTAVYFCSTLDFWGQGTLVTVSS

SEQ ID NO: 13172 - protein, 113 aa, Artificial Sequence
  source: /note="Description of Artificial Sequence: Synthetic polypeptide"
DVVMTQSPLSLSVTLGQPASISCKSSQSLLDSDGKTYLNWLLQRPGQSPKRLIYLVSKLDSGVPDRFSGSGSGTDFTLKISRVEAEDVGVYYCWQGTHFPYTFGGGTKLEIKR

SEQ ID NO: 13173 - protein, 113 aa, Artificial Sequence
  source: /note="Description of Artificial Sequence: Synthetic polypeptide"
DVVMTQSPLSLPVTLGQPASISCKSSQSLLDSDGKTYLNWLLQRPGQSPRRLIYLVSKLDSGVPDRFSGSGSGTDFTLKISRVEAEDVGVYYCWQGTHFPYTFGGGTKLEIKR

SEQ ID NO: 13174 - protein, 113 aa, Artificial Sequence
  source: /note="Description of Artificial Sequence: Synthetic polypeptide"
DVVMTQSPLSLPVTLGQPASISCKSSQSLLDSDGKTYLNWLLQRPGQSPRRLIYLVSKLDSGVPSRFSGSGSGTDFTLKISRVEAEDVGVYYCWQGTHFPYTFGGGTKLEIKR

SEQ ID NO: 13175 - protein, 113 aa, Artificial Sequence
  source: /note="Description of Artificial Sequence: Synthetic polypeptide"
DIVMTQTPLSLSVTIGQPASISCKSSQSLLDSDGKTYLNWLLQKPGQSPKRLIYLVSKLDSGVPDRFSGSGSGTDFTLKISRVEAEDVGVYYCWQGTHFPYTFGGGTKLEIKR

SEQ ID NO: 13176 - protein, 112 aa, Artificial Sequence
  source: /note="Description of Artificial Sequence: Synthetic polypeptide"
EVQLVQSGAEVVKPGATVKISCKASGFTIKDYYLHWVRQRPGKGLEWIGWVDPEDGDTVYAPKFQGRATITADTSTDTAYLELGSLTSEDTAVYFCSTLDFWGQGTLVTVSS

SEQ ID NO: 13177 - protein, 112 aa, Artificial Sequence
  source: /note="Description of Artificial Sequence: Synthetic polypeptide"
EVQLVQSGAEVVKPGATVKISCKASGFTIKDYYLHWVRQRPGKGLEWIGWIDPEDGDTVYAPKFQGRATITADTSTDTAYLELGSLTSEDTAVYFCSTLDFWGQGTLVTVSS

SEQ ID NO: 13178 - protein, 112 aa, Artificial Sequence
  source: /note="Description of Artificial Sequence: Synthetic polypeptide"
EVQLVQSGAEVKRPGALVKISCKASGFNFKDYYLHWVRQRPEQGLEWMGWIDPENGDTVYDEKFQGRVTITADTSTNTAYLQLGSLTSEDTAVYFCSTLDFWGQGTLVTVSS

SEQ ID NO: 13179 - protein, 112 aa, Artificial Sequence
  source: /note="Description of Artificial Sequence: Synthetic polypeptide"
EVQLVQSGAEVKRPGALVKISCKASGYTFTDYYLHWVRQRPEQGLEWMGWVDPEDGDTVYAEKFQGRVTITADTSTNTAYLQLGSLTSEDTAVYFCSTLDFWGQGTLVTVSS

SEQ ID NO: 13180 - protein, 112 aa, Artificial Sequence
  source: /note="Description of Artificial Sequence: Synthetic polypeptide"
EVQLVQSGADVVKPGALVKISCKASGFTIKDYYLHWVRQRPEQGLEWIGWIDPENGDTVYAEKFQGRVTITADTSTNTAYLELGSLTSEDTAVYFCSTLDFWGQGTTLTVSS

SEQ ID NO: 13181 - protein, 112 aa, Artificial Sequence
  source: /note="Description of Artificial Sequence: Synthetic polypeptide"
EVQLVQSGADVVKPGALVKISCKASGFTIKDYYLHWVRQRPGQGLEWIGWVDPEDGDTVYAEKFQGRVTITADTSTDTAYMELGSLTSEDTAVYFCSTLDYWGQGTTLTVSS

SEQ ID NO: 13182 - protein, 112 aa, Artificial Sequence
  source: /note="Description of Artificial Sequence: Synthetic polypeptide"
EVQLVQSGAEVKKPGATVKISCKVSGFNIKDYYLHWVRQAPGKGLEWMGWIDPENGDTVYDPKFQGRVTITADTSTDTAYMELSSLRSEDTAVYYCSTLDFWGQGTLVTVSS

SEQ ID NO: 13183 - protein, 112 aa, Artificial Sequence
  source: /note="Description of Artificial Sequence: Synthetic polypeptide"
EVQLVQSGAEVKKPGALVKISCKVSGYNFKDYYLHWVRQAPGKGLEWMGWIDPENGDTVYDEKFQGRVTITADTSTNTAYMELGSLRSEDTAVYYCSTLDFWGQGTLVTVSS

SEQ ID NO: 13184 - protein, 112 aa, Artificial Sequence
  source: /note="Description of Artificial Sequence: Synthetic polypeptide"
EVQLVQSGAEVKKPGALVKISCKVSGYTFTDYYLHWVRQAPGKGLEWMGWVDPEDGDTVYAEKFQGRVTITADTSTNTAYMELGSLRSEDTAVYYCSTLDFWGQGTLVTVSS

SEQ ID NO: 13185 - protein, 112 aa, Artificial Sequence
  source: /note="Description of Artificial Sequence: Synthetic polypeptide"
EVQLVQSGAEVVKPGATVKISCKVSGFNIKDYYLHWVRQRPGKGLEWIGWIDPENGDTVYDPKFQGKATITADTSTNTAYLELGSLTSEDTAVYYCSTLDFWGQGTLVTVSS

SEQ ID NO: 13186 - protein, 112 aa, Artificial Sequence
  source: /note="Description of Artificial Sequence: Synthetic polypeptide"
EVQLVQSGAEVVKPGALVKISCKVSGYNFKDYYLHWVRQRPGKGLEWMGWIDPENGDTVYDEKFQGRVTITADTSTDTAYLELGSLTSEDTAVYYCSTLDFWGQGTLVTVSS

SEQ ID NO: 13187 - protein, 112 aa, Artificial Sequence
  source: /note="Description of Artificial Sequence: Synthetic polypeptide"
EVQLVQSGAEVVKPGALVKISCKVSGYTFTDYYLHWVRQRPGKGLEWMGWVDPEDGDTVYAEKFQGRVTITADTSTDTAYLELGSLTSEDTAVYYCSTLDFWGQGTLVTVSS

SEQ ID NO: 13188 - protein, 112 aa, Artificial Sequence
  source: /note="Description of Artificial Sequence: Synthetic polypeptide"
EVQLQQSGAELVRSGASVKLSCTASGLNIKDYYIHWVKQRPEQGLEWIGWIDPENDDTEYAPKFQGRATLTTDTSSNTAYLQLSSLTSEDTAVYYCTPLDYWGQGTSVTVSS

SEQ ID NO: 13189 - protein, 442 aa, Artificial Sequence
  source: /note="Description of Artificial Sequence: Synthetic polypeptide"
EVQLQQSGADLVRPGALVKLSCKASGFNIKDYYLHWVRQRPEQGLEWIGWIDPENGDTVYDPKFQGKATITADTSSNTAYLQLGSLTSEDTAVYFCSTLDFWGQGTTLTVSSASTKGPSVFPLAPSSKSTSGGTAALGCLVKDYFPEPVTVSWNSGALTSGVHTFPAVLQSSGLYSLSSVVTVPSSSLGTQTYICNVNHKPSNTKVDKKVEPKSCDKTHTCPPCPAPELLGGPSVFLFPPKPKDTLMISRTPEVTCVVVDVSHEDPEVKFNWYVDGVEVHNAKTKPREEQYNSTYRVVSVLTVLHQDWLNGKEYKCKVSNKALPAPIEKTISKAKGQPREPQVYTLPPSREEMTKNQVSLTCLVKGFYPSDIAVEWESNGQPENNYKTTPPVLDSDGSFFLYSKLTVDKSRWQQGNVFSCSVMHEALHNHYTQKSLSLSPGK

SEQ ID NO: 13190 - protein, 219 aa, Artificial Sequence
  source: /note="Description of Artificial Sequence: Synthetic polypeptide"
DVVMTQTPLTLSVTIGQPASISCKSSQSLLDSDGKTYLNWLLQRPGQSPKRLIYLVSKLDSGVPDRFTGSGSGTDFTLKISRVEAEDLGVYYCWQGTHFPYTFGGGTKLEIKRTVAAPSVFIFPPSDEQLKSGTASVVCLLNNFYPREAKVQWKVDNALQSGNSQESVTEQDSKDSTYSLSSTLTLSKADYEKHKVYACEVTHQGLSSPVTKSFNRGEC

SEQ ID NO: 13191 - protein, 118 aa, Artificial Sequence
  source: /note="Description of Artificial Sequence: Synthetic polypeptide"
QVQLQQPGSVLVRPGASVKLSCKASGYTFTSSWIHWAKQRPGQGLEWIGEIYPNSGNTNYNEKFKGKATLTVDISSSTAYVDLTSLTSEDSAVYYCARLGWLIPLDYWGQGTTLIVSS

SEQ ID NO: 13192 - protein, 114 aa, Artificial Sequence
  source: /note="Description of Artificial Sequence: Synthetic polypeptide"
DIVLSQSPSSLAVSVGEKVTMSCKSSQSLLDGNDQKNYLAWYQQKPGQSPKLLMYWASTRESGVPDRFTGSGSGTDFTLTISSLKAEDLAVYYCQQFYDYPWTFGGGTKLEIKR

SEQ ID NO: 13193 - protein, 118 aa, Artificial Sequence
  source: /note="Description of Artificial Sequence: Synthetic polypeptide"
EVQLQQPGSVLVRPGASVKLSCKASGYTFTSSWIHWAKQRPGQGLEWIGEIYPNSGNTNYNEKFKGKATLTVDISSSTAYVELTSLTSEDTAVYYCARLGWLIPLDYWGQGTTVTVSS

SEQ ID NO: 13194 - protein, 118 aa, Artificial Sequence
  source: /note="Description of Artificial Sequence: Synthetic polypeptide"
EVQLQQSGAELVKPGASVKLSCKASGYTFTSSWIHWVRQAPGQGLEWIGEIYPNSGNTNYNEKFKGRVTLTVDTSASTAYMELTSLTSEDTAVYYCARLGWLIPLDYWGQGTTVTVSS

SEQ ID NO: 13195 - protein, 118 aa, Artificial Sequence
  source: /note="Description of Artificial Sequence: Synthetic polypeptide"
EVQLVQSGAEVVKPGASVKVSCKASGYTFTSSWIHWVRQRPGQGLEWIGEIYPNSGNTNYNEKFKGKATLTVDISISTAYMELSRLTSDDTAVYYCARLGWLIPLDYWGQGTTVTVSS

SEQ ID NO: 13196 - protein, 118 aa, Artificial Sequence
  source: /note="Description of Artificial Sequence: Synthetic polypeptide"
EVQLVQSGAEVVKPGASVKVSCKASGYTFTGSWIHWVRQRPGQGLEWIGEIYPNSGNTNYAEKFKGKATLTVDISISTAYMELSRLTSDDTAVYYCARLGWLIPLDYWGQGTTVTVSS

SEQ ID NO: 13197 - protein, 118 aa, Artificial Sequence
  source: /note="Description of Artificial Sequence: Synthetic polypeptide"
EVQLVQSGAEVVKPGASVKVSCKASGYTFTSSWIHWVRQRPGQGLEWIGEIYPNSGNTNYNEKFKGRVTLTRDISISTAYMELSRLTSDDTAVYYCARLGWLIPLDYWGQGTTVTVSS

SEQ ID NO: 13198 - protein, 118 aa, Artificial Sequence
  source: /note="Description of Artificial Sequence: Synthetic polypeptide"
EVQLVQSGAEVVKPGASVKVSCKASGYTFTGSWIHWVRQRPGQGLEWIGEIYPNSGNTNYAEKFQGRVTLTRDISISTAYMELSRLTSDDTAVYYCARLGWLIPLDYWGQGTTVTVSS

SEQ ID NO: 13199 - protein, 118 aa, Artificial Sequence
  source: /note="Description of Artificial Sequence: Synthetic polypeptide"
EVQLQQPGSVLVRPGASVKLSCKASGYTFTSSWIHWVRQAPGQGLEWIGEIYPNSGNTNYNEKFKGRVTLTVDTSASTAYMELTSLTSEDTAVYYCARLGWLIPLDYWGQGTTVTVSS

SEQ ID NO: 13200 - protein, 118 aa, Artificial Sequence
  source: /note="Description of Artificial Sequence: Synthetic polypeptide"
EVQLQQSGAELVKPGASVKLSCKASGYTFTSSWIHWVRQAPGQGLEWIGEIYPNSGNTNYNEKFKGKATLTVDISSSTAYMELTSLTSEDTAVYYCARLGWLIPLDYWGQGTTVTVSS

SEQ ID NO: 13201 - protein, 118 aa, Artificial Sequence
  source: /note="Description of Artificial Sequence: Synthetic polypeptide"
EVQLQQPGSVLVRPGASVKLSCKASGYTFTSSWIHWVKQRPGQGLEWIGEIYPNSGNTNYNEKFKGKATLTVDISSSTAYVELTSLTSEDTAVYYCARLGWLIPLDYWGQGTTVTVSS

SEQ ID NO: 13202 - protein, 118 aa, Artificial Sequence
  source: /note="Description of Artificial Sequence: Synthetic polypeptide"
EVQLQQPGSVLVRPGASVKLSCKASGYTFTSSWIHWVRQRPGQGLEWIGEIYPNSGNTNYNEKFKGKATLTVDISSSTAYVELTSLTSEDTAVYYCARLGWLIPLDYWGQGTTVTVSS

SEQ ID NO: 13203 - protein, 118 aa, Artificial Sequence
  source: /note="Description of Artificial Sequence: Synthetic polypeptide"
QVQLVQPGAEVKKPGASVKVSCKASGYTFTSSWIHWVRQAPGQGLEWMGEIYPNSGNTNYNEKFKGRVTMTVDISISTAYMELSRLRSDDTAVYYCARLGWLIPLDYWGQGTTVTVSS

SEQ ID NO: 13204 - protein, 118 aa, Artificial Sequence
  source: /note="Description of Artificial Sequence: Synthetic polypeptide"
QVQLVQSGAEVKKPGASVKVSCKASGYTFTSSWIHWVRQAPGQGLEWMGEIYPNSGNTNYNEKFKGRVTMTVDTSISTAYMELSRLRSDDTAVYYCARLGWLIPLDYWGQGTTVTVSS

SEQ ID NO: 13205 - protein, 118 aa, Artificial Sequence
  source: /note="Description of Artificial Sequence: Synthetic polypeptide"
EVQLVQPGAEVKKPGASVKVSCKASGYTFTSSWIHWVRQAPGQGLEWMGEIYPNSGNTNYNEKFKGRVTMTVDISISTAYMELSRLRSDDTAVYYCARLGWLIPLDYWGQGTTVTVSS

SEQ ID NO: 13206 - protein, 114 aa, Artificial Sequence
  source: /note="Description of Artificial Sequence: Synthetic polypeptide"
DIVLTQSPSSLAVSVGEKVTMSCKSSQSLLDGNDQKNYLAWYQQKPGQSPKLLMYWASTRESGVPDRFSGSGSGTDFTLTISSLQAEDVAVYYCQQFYDYPWTFGGGTKLEIKR

SEQ ID NO: 13207 - protein, 114 aa, Artificial Sequence
  source: /note="Description of Artificial Sequence: Synthetic polypeptide"
DIVLTQSPSSLAVSVGERATISCKSSQSLLDGNDQKNYLAWYQQKPGQSPKLLIYWASTRESGVPDRFSGSGSGTDFTLTISSLQAEDVAVYYCQQFYDYPWTFGGGTKLEIKR

SEQ ID NO: 13208 - protein, 114 aa, Artificial Sequence
  source: /note="Description of Artificial Sequence: Synthetic polypeptide"
DIVLTQSPSSLAVSVGEKVTMSCKSSQSLLDGNDQKNYLAWYQQKPGQSPKLLIYWASTRESGVPDRFSGSGSGTDFTLTISSLQAEDVAVYYCQQFYDYPWTFGGGTKLEIKR

SEQ ID NO: 13209 - protein, 448 aa, Artificial Sequence
  source: /note="Description of Artificial Sequence: Synthetic polypeptide"
QVQLQQPGSVLVRPGASVKLSCKASGYTFTSSWIHWAKQRPGQGLEWIGEIYPNSGNTNYNEKFKGKATLTVDISSSTAYVDLTSLTSEDSAVYYCARLGWLIPLDYWGQGTTLIVSSASTKGPSVFPLAPSSKSTSGGTAALGCLVKDYFPEPVTVSWNSGALTSGVHTFPAVLQSSGLYSLSSVVTVPSSSLGTQTYICNVNHKPSNTKVDKKVEPKSCDKTHTCPPCPAPELLGGPSVFLFPPKPKDTLMISRTPEVTCVVVDVSHEDPEVKFNWYVDGVEVHNAKTKPREEQYNSTYRVVSVLTVLHQDWLNGKEYKCKVSNKALPAPIEKTISKAKGQPREPQVYTLPPSREEMTKNQVSLTCLVKGFYPSDIAVEWESNGQPENNYKTTPPVLDSDGSFFLYSKLTVDKSRWQQGNVFSCSVMHEALHNHYTQKSLSLSPGK

SEQ ID NO: 13210 - protein, 221 aa, Artificial Sequence
  source: /note="Description of Artificial Sequence: Synthetic polypeptide"
DIVLSQSPSSLAVSVGEKVTMSCKSSQSLLDGNDQKNYLAWYQQKPGQSPKLLMYWASTRESGVPDRFTGSGSGTDFTLTISSLKAEDLAVYYCQQFYDYPWTFGGGTKLEIKRKTVAAPSVFIFPPSDEQLKSGTASVVCLLNNFYPREAKVQWKVDNALQSGNSQESVTEQDSKDSTYSLSSTLTLSKADYEKHKVYACEVTHQGLSSPVTKSFNRGEC

SEQ ID NO: 13211 - protein, 219 aa, Artificial Sequence
  source: /note="Description of Artificial Sequence: Synthetic polypeptide"
  source: /note="LC of exemplified anti-Tau antibody"
EIVLTQSPGTLSLSPGERATLSCRSSQSLVHSNQNTYLHWYQQKPGQAPRLLIYKVDNRFSGIPDRFSGSGSGTDFTLTISRLEPEDFAVYYCSQSTLVPLTFGGGTKVEIKRTVAAPSVFIFPPSDEQLKSGTASVVCLLNNFYPREAKVQWKVDNALQSGNSQESVTEQDSKDSTYSLSSTLTLSKADYEKHKVYACEVTHQGLSSPVTKSFNRGEC

SEQ ID NO: 13212 - protein, 442 aa, Artificial Sequence
  source: /note="Description of Artificial Sequence: Synthetic polypeptide"
  source: /note="HC of exemplified anti-Tau antibody"
EVQLVQSGAEVKKPGESLKISCKGSGYTFSNYWIEWVRQMPGKGLEWMGEILPGSDSIKYEKNFKGQVTISADKSISTAYLQWSSLKASDTAMYYCARRGNYVDDWGQGTLVTVSSASTKGPSVFPLAPCSRSTSESTAALGCLVKDYFPEPVTVSWNSGALTSGVHTFPAVLQSSGLYSLSSVVTVPSSSLGTKTYTCNVDHKPSNTKVDKRVESKYGPPCPPCPAPEAAGGPSVFLFPPKPKDTLMISRTPEVTCVVVDVSQEDPEVQFNWYVDGVEVHNAKTKPREEQFNSTYRVVSVLTVLHQDWLNGKEYKCKVSNKGLPSSIEKTISKAKGQPREPQVYTLPPSQEEMTKNQVSLTCLVKGFYPSDIAVEWESNGQPENNYKTTPPVLDSDGSFFLYSRLTVDKSRWQEGNVFSCSVMHEALHNHYTQKSLSLSLG

SEQ ID NO: 13213 - protein, 112 aa, Artificial Sequence
  source: /note="Description of Artificial Sequence: Synthetic polypeptide"
  source: /note="LCVR of exemplified anti-Tau antibody"
EIVLTQSPGTLSLSPGERATLSCRSSQSLVHSNQNTYLHWYQQKPGQAPRLLIYKVDNRFSGIPDRFSGSGSGTDFTLTISRLEPEDFAVYYCSQSTLVPLTFGGGTKVEIK

SEQ ID NO: 13214 - protein, 116 aa, Artificial Sequence
  source: /note="Description of Artificial Sequence: Synthetic polypeptide"
  source: /note="HCVR of exemplified anti-Tau antibody"
EVQLVQSGAEVKKPGESLKISCKGSGYTFSNYWIEWVRQMPGKGLEWMGEILPGSDSIKYEKNFKGQVTISADKSISTAYLQWSSLKASDTAMYYCARRGNYVDDWGQGTLVTVSS

SEQ ID NO: 13215 - protein, 117 aa, Mus musculus
QVQLQQPGAELLKPGASVKLSCKASGYTFTSYWMHWVKQRPGRGLEWIGRIDPNSDRTKYNEKFKRKATLTVDKSSSTAYMQLSSLTSEDSAVYYCARDDYAWFAYWGQGTLVTVSA

SEQ ID NO: 13216 - protein, 112 aa, Mus musculus
DVLMTQTPLSLPVSLGDQASISCRSSQSIVHSNGNTYLEWYLQKPGQSPKLLIYKLSNRFSGVPDRFSGSGSGTDFTLKISRVEAEDLGVYYCFQGSHVPPTFGGGTKLEIK

SEQ ID NO: 13217 - protein, 119 aa, Mus musculus
QVTLKESGPGILQSSQTLSLTCSFSGFSLSTSGMGVSWIRQPSGKGLEWLAHIYWDDDKRYNASLKSRLTISKDTSRNQVFLKITCVDTADTATYYCARLLRPYALDYWGQGTSVTVSS

SEQ ID NO: 13218 - protein, 112 aa, Mus musculus
NILMTQSPSSLAVSAGEKVTMSCKSSQSVLYSSNQKNYLAWYQQKPGQSPKLLIYWASTRESGVPDRFTGSGSGTDFTLTISSVQAEDLAVYYCLQYLSSLTFGAGTKLELK

SEQ ID NO: 13219 - protein, 115 aa, Mus musculus
EVQLQQSGPELVKPGASVKISCKASGYTFTDYYMNWVKQSHGKSLEWIGDINPNNGGTSYNQKFKGKATLTVDKSSSTAYMELRSLTSEDSAVYYCVREGRFAYWGHGTLVTVSA

SEQ ID NO: 13220 - protein, 112 aa, Mus musculus
  VARIANT (3)..(3): /replace="Val"
  SITE (1)..(112): /note="Variant residues given in the sequence have no preference with respect to those in the annotations for variant positions"
DIMMTQAAPSVPVTPGESVSISCRSSKSLLHSNGNTYLYWFLQRPGQSPQLLIYRMSNLASGVPDRFSGSGSGTAFTLRISRVEAEDVGVYYCMQHLKSPYTFGGGTKLEIK

SEQ ID NO: 13221 - protein, 115 aa, Mus musculus
QVQLKQSGAELVRPGASVKLSCKASGYTFTDYYINWVKQRPGQGLEWIARIYPGRGNIYYNEKFKGKATLTAEKSSSTAYMQLSSLTSEDSAVYFCARFWDVTYWGQGTLVTVSA

SEQ ID NO: 13222 - protein, 112 aa, Mus musculus
DVLMTQTPLSLPVSLGDQASISCRSSQSIVHSNGNTYLEWFLQKPGQSPKLLIYKVSNRFSGVPDRFSGSGSGTDFTLKISRVEAEDLGVYYCFQGSHVPYTFGGGTKLEIK

SEQ ID NO: 13223 - protein, 115 aa, Mus musculus
EVQLQQSGPELVKPGASVKISCKASGFTFTDYYMNWVKQSHGKSLEWIGDINPNNGGTSYHQKFKGKATLTVDKSSSTAYMELRSLTSEDSAVYYCVREGRFAYWGQGTLVTVSA

SEQ ID NO: 13224 - protein, 107 aa, Mus musculus
DIVMTQSQKFMSTSVGDRVSVTCKASQNVGTNVAWYQQKPGQSPKALIYSASYRYSGVPDRFTGSGSGTDFTLTISNVQSEDLAEYFCQQYNSYPYTFGGGTKLEIK

SEQ ID NO: 13225 - protein, 112 aa, Mus musculus
DIVMTQAAPSVPVTPGESVSISCRSSKSLLHSNGNTYLYWFLQRPGQSPQLLIHRMSNLASGVPDRFSGSGSGTAFTLRISRVEAEDVGVYYCMQHLKSPYTFGGGTKLEIK

SEQ ID NO: 13226 - protein, 112 aa, Mus musculus
DIVMTQAAPSVPVTPGESVSISCRSSKSLLHSNGNTYLYWFLQRPGQSPQLLIYRMSNLASGVPDRFSGSGSGTAFTLRISRVEAEDVGVYYCMQHLKSPYTFGGGTKLEIK

SEQ ID NO: 13227 - protein, 117 aa, Artificial Sequence
  source: /note="Description of Artificial Sequence: Synthetic polypeptide"
  source: /note="Synthetic: 37D3-H9 heavy chain variable region (VH)"
EVQLVESGGDLAKPGGSLKLSCTASGLIFRSYGMSWVRQTPDKRLEWVATINSGGTYTYYPDSVKGRFTISRDNAKNTLYLQMSSLKSEDTAMYYCANSYSGAMDYWGQGTSVTVSS

SEQ ID NO: 13228 - protein, 112 aa, Artificial Sequence
  source: /note="Description of Artificial Sequence: Synthetic polypeptide"
  source: /note="Synthetic: 37D3-H9 light chain variable region (VL)"
DDLLTQTPLSLPVSLGDPASISCRSSQSIVHSNGNTYFEWYLQKPGQSPKLLIYKVSNRFSGVPDRFSGSGSGTDFTLKISRVEAEDLGVYYCFQGSLVPWTFGGGTKLEIK

SEQ ID NO: 13229 - protein, 112 aa, Artificial Sequence
  source: /note="Description of Artificial Sequence: Synthetic polypeptide"
  source: /note="Synthetic: 37D3-H9b light chain variable region (VL)"
EDLLTQTPLSLPVSLGDPASISCRSSQSIVHSNGNTYFEWYLQKPGQSPKLLIYKVSNRFSGVPDRFSGSGSGTDFTLKISRVEAEDLGVYYCFQGSLVPWTFGGGTKLEIK

SEQ ID NO: 13230 - protein, 117 aa, Artificial Sequence
  source: /note="Description of Artificial Sequence: Synthetic polypeptide"
  source: /note="Synthetic: 11E10-B8 heavy chain variable region (VH)"
EVQLVESGGDLVKPGGSLKLSCAASGFTFRSYGMSWVRQTPDKRLEWVATISGGGSYTYYPDSVKGRFTISRDNAKNTLYLQMSSLKSEDTAMYYCAVSYDGAMDYWGQGTSVTVSS

SEQ ID NO: 13231 - protein, 112 aa, Artificial Sequence
  source: /note="Description of Artificial Sequence: Synthetic polypeptide"
  source: /note="Synthetic: 11E10-B8 light chain variable region (VL)"
DVLMTQTPLSLPVSLGDQASISCRSSQSIVHSNGNTYLEWYLQKPGQSPKLLIYKVSNRFSGVPDRFSGSGSGTDFTLKISRVEAEDLGLYYCFQGSHVPWTFGGGTKLEIK

SEQ ID NO: 13232 - protein, 117 aa, Artificial Sequence
  source: /note="Description of Artificial Sequence: Synthetic polypeptide"
  source: /note="Synthetic: 54C1-H11 and 61E7-C4 heavy chain variable region (VH)"
EVQLVESGGDLVKPGGSLKVSCVASGFTFRSYGMSWVRQTPDKRLDWVATISSGGNYTYYPDSVKGRFTISRDNAKNTLYLQMSSLKSEDTAMYYCASSYSGAMDYWGQGTSVTVSS

SEQ ID NO: 13233 - protein, 112 aa, Artificial Sequence
  source: /note="Description of Artificial Sequence: Synthetic polypeptide"
  source: /note="Synthetic: 54C1-H11 and 61E7-C4 light chain variable region (VL)"
DTVMTQSPLSLPVSLGDQASISCRSSQSIVHSNGNTYLEWYLQKPGQSPKLLIYTVSNRFSGVPDRFSGSGSGTDFTLKISRVEAEDLGVYYCFQGSHVPWTFGGGTKLEIK

SEQ ID NO: 13234 - protein, 117 aa, Artificial Sequence
  source: /note="Description of Artificial Sequence: Synthetic polypeptide"
  source: /note="Synthetic: 3A4-H4 heavy chain variable region (VH)"
EVQLVESGGDLVKPGGSLKLSCAASGFTFSSYGMSWVRQTPDKRLEWVATISSGGTYTYYPDSVKGRFTISRDNAKNTLYLQMSSLKSEDTAMYFCATSYDGAMDYWGQGTSVTVSS

SEQ ID NO: 13235 - protein, 112 aa, Artificial Sequence
  source: /note="Description of Artificial Sequence: Synthetic polypeptide"
  source: /note="Synthetic: 3A4-H4 light chain variable region (VL)"
DVLMTQTPLSLPVSLGDQASISCRSSQNIVHSNGNTYLEWYLQKPGQSPKLLIYKVSNRFSGVPDRFSGSGSGTDFTLKISRVEAEDLGVYYCFQGTLVPWTFGGGTKLEIK

SEQ ID NO: 13236 - protein, 117 aa, Artificial Sequence
  source: /note="Description of Artificial Sequence: Synthetic polypeptide"
  source: /note="Synthetic: 19H6-F7 heavy chain variable region (VH)"
EVQLVESGGDLVKPGGSLKLSCAASGFTFSSYGMSWVRQTPDKRLEWVATISSGGTYTYYPDSVKGRFTISRDNAKNTLYLQMSSLKSEDTAMYYCAPSYDGAMDYWGQGTSVTVSS

SEQ ID NO: 13237 - protein, 112 aa, Artificial Sequence
  source: /note="Description of Artificial Sequence: Synthetic polypeptide"
  source: /note="Synthetic: 19H6-F7 light chain variable region (VL)"
DVLMTQTPLSLPVSLGDQASISCRSSQSIVHSNGNTYLEWYLQKPGQSPKLLIYKVSNRFSGVPDRFSGSGSGTDFTLKISRVEAEDLGVYYCFQGSLVPWTFGGGTKLEIK

SEQ ID NO: 13238 - protein, 113 aa, Artificial Sequence
  source: /note="Description of Artificial Sequence: Synthetic polypeptide"
  source: /note="Synthetic: 94B2-C1 heavy chain variable region (VH)"
EVQLQQSGPELVKPGASMKISCKASGYSLTGYTMNWVKQSHGKNLEWIGLISPYNGVTSYNQKFKGKATLTVDKSSNTAYMELLSLTFEDSAVYYCARQGAYWGQGTLVTVSA

SEQ ID NO: 13239 - protein, 112 aa, Artificial Sequence
  source: /note="Description of Artificial Sequence: Synthetic polypeptide"
  source: /note="Synthetic: 94B2-C1 light chain variable region (VL)"
DVVMTQTPLTLSVTIGQPASISCKSSQSLLDSDGKTYLNWLLQRPGQSPKRLIYLVSKLDSGVPDRFTGSGSGTDFTLKISRVEAEDLGVYYCWQGTHFPWTFGGGTKLEIK

SEQ ID NO: 13240 - protein, 115 aa, Artificial Sequence
  source: /note="Description of Artificial Sequence: Synthetic polypeptide"
  source: /note="Synthetic: 125B11-H3 heavy chain variable region (VH)"
EVKLEESGGGLVQPGGSMKLSCVASRFIFSNYWMNWVRQSPEKGLEWVAQIRLKSDNYATHYAESVKGRFTISRDDSKSSVYLQMNNLRAEDTGIYYCTGGTTYWGQGTTLTVSS

SEQ ID NO: 13241 - protein, 107 aa, Artificial Sequence
  source: /note="Description of Artificial Sequence: Synthetic polypeptide"
  source: /note="Synthetic: 125B11-H3 light chain variable region (VL)"
DIVMTQSQKFLSTSVGDRVNITCKASQNVGTAVAWYQQKPGQSPGLLIYSASIRYTGVPDRFTGNGSGTDFTLTISDMQSEDLADYFCQQFRTYPYTFGGGTKLEIK

SEQ ID NO: 13242 - protein, 115 aa, Artificial Sequence
  source: /note="Description of Artificial Sequence: Synthetic polypeptide"
  source: /note="Synthetic: 113F5-F7 heavy chain variable region (VH)"
EVKLEESGGGLVQPGGSMRLSCVASEFTFSNYWMNWIRQSPEKGLEWVAQIRLKSDNYATHYAESVKGRFTISRDASNFSVYLQMNNLRAEDTGIYYCTGGTSYWGQGTTLTVSS

SEQ ID NO: 13243 - protein, 107 aa, Artificial Sequence
  source: /note="Description of Artificial Sequence: Synthetic polypeptide"
  source: /note="Synthetic: 113F5-F7 light chain variable region (VL)"
DIVMTQSQKIMSTSVGDRVSITCKASQNVGTAVAWYQQRPGHSPKLLIYSASRRFSGVPDRFTGSGSGTDFTLTIINVQSEDLADYFCQQFSTYPYTFGVGTKLEIK

SEQ ID NO: 13244 - protein, 121 aa, Artificial Sequence
  source: /note="Description of Artificial Sequence: Synthetic polypeptide"
  source: /note="Synthetic: 26C1-B11 heavy chain variable region (VH)"
EVHLQQSGAELVRSGASVKLSCTASGFNIKDYYMYWVKQRPEQGLEWIGWIDPENGDTEYFPKFQGKATMTADTSSKTAYLQLSSLTSEDTAVYYCNAWRARATNSALDYWGQGTSVTVSS

SEQ ID NO: 13245 - protein, 112 aa, Artificial Sequence
  source: /note="Description of Artificial Sequence: Synthetic polypeptide"
  source: /note="Synthetic: 26C1-B11 light chain variable region (VL)"
DVVMTQTPLTLSVTIGQPASISCKSSQSLLDSDGKTYLNWLLRRPGQSPKRLIYLVSKLDSGVPDRFTGSGSGTDFTLKISRVEAEDLGVYYCWQGTHFPWTFGGGTKLEIK

SEQ ID NO: 13246 - protein, 117 aa, Artificial Sequence
  source: /note="Description of Artificial Sequence: Synthetic polypeptide"
  source: /note="Synthetic: 30G1-B2  heavy chain variable region (VH)"
QVQLQQSGAELVRPGASVTLSCKASGYTFTDYEMYWVKQTPVHGLEWIGAIDPETGDTAYNQKFKGKATLTADKSSNTAYMELRSLTSEDSAVYYCIRQYGNWFPYWGQGTLVTVSA

SEQ ID NO: 13247 - protein, 112 aa, Artificial Sequence
  source: /note="Description of Artificial Sequence: Synthetic polypeptide"
  source: /note="Synthetic: 30G1-B2 light chain variable region (VL)"
DVVMTQTPLSLPVSLGDQASISCRSSQSLVHANGNTYLHWFLQKPGLSPKLLIYKVSNRFSGVPDRFSGGGSGTDFTLKITRLEAEDLGVYFCSQSTHVPFTFGSGTKLEIK

SEQ ID NO: 13248 - protein, 114 aa, Artificial Sequence
  source: /note="Description of Artificial Sequence: Synthetic polypeptide"
  source: /note="Synthetic: 66F5-A1 heavy chain variable region (VH)"
QVQLQQSGAELVRPGASVTLSCKASGYTFIDYEMNWVKQTPVHGLEWIGAIDPENGGTAYNQKFKGKAIVTADKSSSTAYMELRSLTSEDSAVYYCSGPHFDYWGQGTTLTVSS

SEQ ID NO: 13249 - protein, 113 aa, Artificial Sequence
  source: /note="Description of Artificial Sequence: Synthetic polypeptide"
  source: /note="Synthetic: 66F5-A1 light chain variable region (VL)"
DIVMTQSPSSLAMSVGQKVTMSCKSSQSLLNSSTQKNYLAWYQQKPGQSPKLLVYFASTRESGVPDRFIGSGSGTDFTLTISSVQAEDLADYFCQQHYSTPYTFGGGTKLEIK

SEQ ID NO: 13250 - protein, 119 aa, Artificial Sequence
  source: /note="Description of Artificial Sequence: Synthetic polypeptide"
  source: /note="Synthetic: 123E9-A1 heavy chain variable region (VH)"
EVQLQQSGPELVKPGASVKMSCKASGYTFTDYYMKWVKQSHGKSLEWIGDIDPNNGGTSYNQKFKGKATLTVDKSSSTAYMQLNSLTSEDSAVYYCARSAGFGDSFSFWGLGTLVTVSA

SEQ ID NO: 13251 - protein, 112 aa, Artificial Sequence
  source: /note="Description of Artificial Sequence: Synthetic polypeptide"
  source: /note="Synthetic: 123E9-A1 light chain variable region (VL)"
DVLMTQTPLSLPVSLGDQASISCRSSQSIVHSNGNTYLEWYLQKPGQSPKLLIYKVSNRFSGVPDRFSGSGSGTDFTLKISRVEAEDLGFYYCFQGSHVPPTFGGGTKLEIK

SEQ ID NO: 13252 - protein, 119 aa, Artificial Sequence
  source: /note="Description of Artificial Sequence: Synthetic polypeptide"
  source: /note="Synthetic: 15C6-A7 heavy chain variable region (VH)"
EVQLQQSGPELVKPGASVMMTCKASGYTFTDYYMKWVKQSNGKSLEWIGDLDPYTGGANYNQKFKGKATLTVDKSSSTAYMHLNSLTSEDSAVYYCARSRGYGDSFAYWGQGTLVTVSA

SEQ ID NO: 13253 - protein, 112 aa, Artificial Sequence
  source: /note="Description of Artificial Sequence: Synthetic polypeptide"
  source: /note="Synthetic: 15C6-A7 light chain variable region (VL)"
DVLMTQTPLSLPVSLGDQASISCRSSQNIVHSNGNTYLEWYLQKPGQSPKLLIYKVSNRFSGVPDKFSGSGSGTDFTLKISRVEAEDLGVYFCFQGSHVPPTFGGGTKLEIK

SEQ ID NO: 13254 - protein, 119 aa, Artificial Sequence
  source: /note="Description of Artificial Sequence: Synthetic polypeptide"
  source: /note="Synthetic: 19F8-B1  heavy chain variable region (VH)"
EVQLQQSGPELVKPGASVKMSCKASGYTFTDYYMKWVKQSHGKSLEWIGDLNPNNGGTLYNQKFKGQATLTVDKSSSTAYMQFNSLTSEDSAVYYCARSAGYGDSFAYWGQGTLVTVSA

SEQ ID NO: 13255 - protein, 112 aa, Artificial Sequence
  source: /note="Description of Artificial Sequence: Synthetic polypeptide"
  source: /note="Synthetic: 19F8-B1  light chain variable region (VL)"
DVLMTQTPLSLPVSLGDQASISCRSSQNIVHSNGNTYLEWYLQKPGQSPKLLIYKVSNRFSGVPDRFSGSGSGTDFTLKISRVEAEDLGIYFCFQGSHVPPTFGGGTKLEIK

SEQ ID NO: 13256 - protein, 119 aa, Artificial Sequence
  source: /note="Description of Artificial Sequence: Synthetic polypeptide"
  source: /note="Synthetic: 24A11-D5 heavy chain variable region (VH)"
EVQLQQSGPELVKPGASVKMSCKASGYTFTDYYMKWVKQSHGKSLEWIGDLNPKNGGIIYNQKFKGQATLTVDKSSSTAYMQLNSLTSEDSAVFYCARSGGYGDSFAYWGQGTLVTVSA

SEQ ID NO: 13257 - protein, 114 aa, Artificial Sequence
  source: /note="Description of Artificial Sequence: Synthetic polypeptide"
  source: /note="Synthetic: 126F11-G11 heavy chain variable region (VH)"
EVQLQQSGAELVRPGASVKLSCTASGFNIKDDYMHWVKQRPEQGLEWIGWIDPENGDTEYASKFQGKATITTDTSSNTAYLQLSSLTSEDTAVYYCLDFAYGYWGQGTTLTVSS

SEQ ID NO: 13258 - protein, 112 aa, Artificial Sequence
  source: /note="Description of Artificial Sequence: Synthetic polypeptide"
  source: /note="Synthetic: 126F11-G11 light chain variable region (VL)"
DVLMTQTPLSLPVSLGDQASISCRSSQSIVHSNGNTYLEWYLQKPGQSPKLLIYKVSNRFSGVPDRFSGSGSGTDFTLKISRVEAEDLGVYYCFQGSHVPPAFGGGTKLEIK

SEQ ID NO: 13259 - protein, 120 aa, Artificial Sequence
  source: /note="Description of Artificial Sequence: Synthetic polypeptide"
  source: /note="Synthetic: 89F4-A1 heavy chain variable region (VH)"
EVQLVESGGGLVQPKGSLKLSCAASGFTFNTYAMNWVRQAPGKGLEWVARIRSKSNNYAAYFADSVKDRFTISRDDSQTMLYLQMNNLKSEDTAMYYCVSGGNYVPFAYWGQGTLVTVSA

SEQ ID NO: 13260 - protein, 112 aa, Artificial Sequence
  source: /note="Description of Artificial Sequence: Synthetic polypeptide"
  source: /note="Synthetic: 89F4-A1 light chain variable region (VL)"
NIMMTQSPSSLAVSAGEKVTMSCKSSQSVFYSSEQRNYLAWYQQKPGQSPKLLISWASTRESGVPDRFTGSGSGTDFTLTISSVQGEDLAVYYCHQYLSSFTFGSGTKLEIK

SEQ ID NO: 13261 - protein, 115 aa, Artificial Sequence
  source: /note="Description of Artificial Sequence: Synthetic polypeptide"
  source: /note="Synthetic: 93A8-D2 heavy chain variable region (VH)"
EVQLQQSGPVLVKPGASVKMSCKASGYTFTDYYVNWVKQSHGKGLEWIGLINPNNGRTSYNQNFNDKATLTVDKSSSTAFMDLNSLTSEDSAVYYCTREGGTGYWGQGTTLSVSS

SEQ ID NO: 13262 - protein, 112 aa, Artificial Sequence
  source: /note="Description of Artificial Sequence: Synthetic polypeptide"
  source: /note="Synthetic: 93A8-D2 light chain variable region (VL)"
DVVMTQTPLTLSVTIGQPASISCKSSQSLLDSDGKTYLNWLLQRPGQSPRRLIYLVSKLDSGVPDRFTGSGSGTDFTLKISRVAAEDLGVYYCWQGTHFPRTFGGGTKLEIK

SEQ ID NO: 13263 - protein, 120 aa, Artificial Sequence
  source: /note="Description of Artificial Sequence: Synthetic polypeptide"
  source: /note="Synthetic: 14F5-D9 heavy chain variable region (VH)"
EVKLVESGGGLVQPGGSLRLSCATSGFTFSDFYMEWVRQSPGKRLEWIAASKNKANDYTTEYNASVKDRFFVSRDTSQSILYLQMNALRAEDTAIYYCARDALGTVFAYWGQGTLVTVSA

SEQ ID NO: 13264 - protein, 112 aa, Artificial Sequence
  source: /note="Description of Artificial Sequence: Synthetic polypeptide"
  source: /note="Synthetic: 14F5-D9 light chain variable region (VL)"
DVVMTQTPLSLPVSLGDQASISCRSSQSLVHSNGNTYLHWYLQKPGQSPKLLIYKVFNRFSGVPDRFSGSGSGTDFTLKISRVEAEDLGVYFCSQSTLVPLTFGAGTKLELK

SEQ ID NO: 13265 - protein, 122 aa, Artificial Sequence
  source: /note="Description of Artificial Sequence: Synthetic polypeptide"
  source: /note="Synthetic: 73H6-B8 heavy chain variable region (VH)"
QVQLKESGPGLVAPSQSLSITCTISGFSLTSYGVHWVRQPPGKGLEWLVVIWSDGSTTYNSALKSRLSISKDNSKSQVFLKMNSLQTDDTAMYYCARQGGFITTAYYAMDYWGQGTSVTVSS

SEQ ID NO: 13266 - protein, 112 aa, Artificial Sequence
  source: /note="Description of Artificial Sequence: Synthetic polypeptide"
  source: /note="Synthetic: 73H6-B8 light chain variable region (VL)"
DIVMSQSPSSLAVSAGEKVTMSCKSSQSLLNSRTRKNYLAWYQQKPGQSPKLLIYWASTRESGVPDRFTGSGSGTDFTLTISSVQAEDLAVYYCKQSYNLYTFGGGTKLEIK

SEQ ID NO: 13267 - protein, 120 aa, Artificial Sequence
  source: /note="Description of Artificial Sequence: Synthetic polypeptide"
  source: /note="Synthetic: 22G7-C9 heavy chain variable region (VH)"
QIQLVQSGPELKKPGETVKISCKASGYTFTDCSIHWVKQAPGEGLKWMGWINTETGEPSYADDFKGRFAFSLETSASTAFLQINNLKSEDTASYFCGTAYYRYDGALDYWGQGTSVTVSS

SEQ ID NO: 13268 - protein, 111 aa, Artificial Sequence
  source: /note="Description of Artificial Sequence: Synthetic polypeptide"
  source: /note="Synthetic: 22G7-C9 light chain variable region (VL)"
DIVLTQSPASLAVSLGQRATISCRASQSVSTSSYSYMHWFQQKPGQPPKLLIKYASNLESGVPARFSGSGSGTDFTLNIHPVEEEDTATYYCQHSWELPWTFGGGTKLEIK

SEQ ID NO: 13269 - protein, 116 aa, Artificial Sequence
  source: /note="Description of Artificial Sequence: Synthetic polypeptide"
  source: /note="Synthetic: 7A11-C12 heavy chain variable region (VH)"
QIQLVQSGPDLKKPGETVKISCKASGYTFTNYGMNWVKQAPGKGLKWMGWINTNTGEPTYAEEFKGRFAFSLETSASTAYLQIDNLKNEDTATYFCARGTVSFPYWGQGTLVTVSA

SEQ ID NO: 13270 - protein, 112 aa, Artificial Sequence
  source: /note="Description of Artificial Sequence: Synthetic polypeptide"
  source: /note="Synthetic: 7A11-C12 light chain variable region (VL)"
DVVMSQTPLSLPVSLGDHASISCRSSQNLVHSDGNTYLHWYLQKPGQSPKLLIYKVSNRFSGVPDRFSGSGSGTDFTLKISRVEAEDLGVYFCSQSTHVIFTFGSGTKLEIK

SEQ ID NO: 13271 - protein, 115 aa, Artificial Sequence
  source: /note="Description of Artificial Sequence: Synthetic polypeptide"
  source: /note="Synthetic: 12A10-E8 heavy chain variable region (VH)"
QIQLVQSGPELKKPGETVKISCKASGYTFTNYGMNWVKQAPGKGLKWMGWINMYTGEPTYGDDFKGRFVFSLETSVSTVYLQINNLKKEDTATFFCARGGRPDYWGQGTSVTVSS

SEQ ID NO: 13272 - protein, 112 aa, Artificial Sequence
  source: /note="Description of Artificial Sequence: Synthetic polypeptide"
  source: /note="Synthetic: 12A10-E8 light chain variable region (VL)"
DVLMTQTPLSLPVSLGDQASISCRSSQSIVHSNGNTYLEWYLQKPGQSPKLLIYKVFNRFSGVPDRFSGSGSGTDFTLKINRVEAEDLGVYYCLQGSHVPYTFGGGTKLEIK

SEQ ID NO: 13273 - protein, 120 aa, Artificial Sequence
  source: /note="Description of Artificial Sequence: Synthetic polypeptide"
  source: /note="Synthetic: 55E7-F11 heavy chain variable region (VH)"
EVKLEESGGGLVQPGGSMKLSCVASGFTFSNYWMNWVRQSPEKGLEWVAQIRLKSDNYATHYAESVKGRFTISRDDSKSSVYLQMNNLRAEDTGIYYCAGYFYGGYFDVWGTGTTVTVSS

SEQ ID NO: 13274 - protein, 108 aa, Artificial Sequence
  source: /note="Description of Artificial Sequence: Synthetic polypeptide"
  source: /note="Synthetic: 55E7-F11 light chain variable region (VL)"
ELVLTQSPTTMAASPGKKITITCSASSSISSNYLHWYQQKPGFSPKLLIYRTSNLASGVPARFSGSGSGTSYSLTIGTMEAEDVATYYCQQGSSLPFTFGSGTKLEIK

SEQ ID NO: 13275 - protein, 117 aa, Artificial Sequence
  source: /note="Description of Artificial Sequence: Synthetic polypeptide"
  source: /note="Synthetic: 52F6-F11 heavy chain variable region (VH)"
QVQLQQSGTELAKPGASVKLSCKASGYTFTHYWMHWIKQRPGQGLEWIGYIYPTNDYTKYNQNFRDKATLTADESSNSAYMQLNSLTYEDSAVYYCARAGNRVFDFWGQGTTLTVSS

SEQ ID NO: 13276 - protein, 109 aa, Artificial Sequence
  source: /note="Description of Artificial Sequence: Synthetic polypeptide"
  source: /note="Synthetic: 52F6-F11 light chain variable region (VL)"
QAVVTQESALTTSPGETVTLTCRSSTGAVTTSNFANWVQEKPDHLFTGLIGGTNNRAPGVPARFSGSLIGDKAALTITGAQTEDEAIYFCALWYSNLWVFGGGTKLTVL

SEQ ID NO: 13277 - protein, 117 aa, Artificial Sequence
  source: /note="Description of Artificial Sequence: Synthetic polypeptide"
  source: /note="Synthetic: Hu37D3-H9.v1 heavy chain variable region (VH)"
EVQLVESGGGLVQPGGSLRLSCAASGLIFRSYGMSWVRQAPGKGLEWVATINSGGTYTYYPDSVKGRFTISRDNSKNTLYLQMNSLRAEDTAVYYCANSYSGAMDYWGQGTLVTVSS

SEQ ID NO: 13278 - protein, 112 aa, Artificial Sequence
  source: /note="Description of Artificial Sequence: Synthetic polypeptide"
  source: /note="Synthetic: Hu37D3-H9.v1 light chain variable region (VL)"
EDQLTQSPSSLSASVGDRVTITCRSSQSIVHSNGNTYFEWYQQKPGKSPKLLIYKVSNRFSGVPSRFSGSGSGTDFTLTISSLQPEDFATYYCFQGSLVPWTFGQGTKVEIK

SEQ ID NO: 13279 - protein, 447 aa, Artificial Sequence
  source: /note="Description of Artificial Sequence: Synthetic polypeptide"
  source: /note="Synthetic: Hu37D3-H9.v1 IgG1 heavy chain"
EVQLVESGGGLVQPGGSLRLSCAASGLIFRSYGMSWVRQAPGKGLEWVATINSGGTYTYYPDSVKGRFTISRDNSKNTLYLQMNSLRAEDTAVYYCANSYSGAMDYWGQGTLVTVSSASTKGPSVFPLAPSSKSTSGGTAALGCLVKDYFPEPVTVSWNSGALTSGVHTFPAVLQSSGLYSLSSVVTVPSSSLGTQTYICNVNHKPSNTKVDKKVEPKSCDKTHTCPPCPAPELLGGPSVFLFPPKPKDTLMISRTPEVTCVVVDVSHEDPEVKFNWYVDGVEVHNAKTKPREEQYNSTYRVVSVLTVLHQDWLNGKEYKCKVSNKALPAPIEKTISKAKGQPREPQVYTLPPSREEMTKNQVSLTCLVKGFYPSDIAVEWESNGQPENNYKTTPPVLDSDGSFFLYSKLTVDKSRWQQGNVFSCSVMHEALHNHYTQKSLSLSPGK

SEQ ID NO: 13280 - protein, 219 aa, Artificial Sequence
  source: /note="Description of Artificial Sequence: Synthetic polypeptide"
  source: /note="Synthetic: Hu37D3-H9.v1 IgG1 light chain"
EDQLTQSPSSLSASVGDRVTITCRSSQSIVHSNGNTYFEWYQQKPGKSPKLLIYKVSNRFSGVPSRFSGSGSGTDFTLTISSLQPEDFATYYCFQGSLVPWTFGQGTKVEIKRTVAAPSVFIFPPSDEQLKSGTASVVCLLNNFYPREAKVQWKVDNALQSGNSQESVTEQDSKDSTYSLSSTLTLSKADYEKHKVYACEVTHQGLSSPVTKSFNRGEC

SEQ ID NO: 13281 - protein, 112 aa, Artificial Sequence
  source: /note="Description of Artificial Sequence: Synthetic polypeptide"
  source: /note="Synthetic: Hu37D3-H9.v5 light chain variable region (VL)"
EDVLTQTPLSLPVTPGQPASISCRSSQSIVHSNGNTYFEWYLQKPGQSPQLLIYKVSNRFSGVPDRFSGSGSGTDFTLKISRVEAEDVGVYYCFQGSLVPWTFGQGTKVEIK

SEQ ID NO: 13282 - protein, 113 aa, Artificial Sequence
  source: /note="Description of Artificial Sequence: Synthetic polypeptide"
  source: /note="Synthetic: Hu94B2.v105 heavy chain variable region (VH)"
EVQLVQSGAEVKKPGASVKVSCKASGYSLTGYTMNWVRQAPGQGLEWIGLISPYNGVTSYNQKFKGRATLTVDKSTSTAYLELSSLRSEDTAVYYCARQGAYWGQGTLVTVSS

SEQ ID NO: 13283 - protein, 112 aa, Artificial Sequence
  source: /note="Description of Artificial Sequence: Synthetic polypeptide"
  source: /note="Synthetic: Hu94B2.v105 light chain variable region (VL)"
DIVMTQTPLSLPVTPGQPASISCKSSQSLLDSDGKTYLNWLLQKPGQSPQRLIYLVSKLDSGVPDRFSGSGSGTDFTLKISRVEAEDVGVYYCWQGTHFPWTFGQGTKVEIK

SEQ ID NO: 13284 - protein, 115 aa, Artificial Sequence
  source: /note="Description of Artificial Sequence: Synthetic polypeptide"
  source: /note="Synthetic: hu125B11.v17 heavy chain variable region (VH)"
EVQLVESGGGLVQPGGSLRLSCAASRFIFSNYWMNWVRQAPGKGLEWVAQIRLKSDNYATHYAESVKGRFTISRDDSKNTLYLQMNSLRAEDTAVYYCTGGTTYWGQGTLVTVSS

SEQ ID NO: 13285 - protein, 107 aa, Artificial Sequence
  source: /note="Description of Artificial Sequence: Synthetic polypeptide"
  source: /note="Synthetic: hu125B11.v17 light chain variable region (VL)"
DIQMTQSPSSLSASVGDRVTITCKASQNVGTAVAWYQQKPGKSPKLLIYSASIRYTGVPSRFSGSGSGTDFTLTISSLQPEDFATYFCQQFRTYPYTFGQGTKVEIK

SEQ ID NO: 13286 - protein, 115 aa, Artificial Sequence
  source: /note="Description of Artificial Sequence: Synthetic polypeptide"
  source: /note="Synthetic: hu125B11.v26 heavy chain variable region (VH)"
EVQLVESGGGLVQPGGSLRLSCAASRFIFSNYWMNWVRQAPGKGLEWVAQIRLKSDNYATHYAESVKGRFTISRDNSKNTLYLQMNSLRAEDTAVYYCTGGTTYWGQGTLVTVSS

SEQ ID NO: 13287 - protein, 107 aa, Artificial Sequence
  source: /note="Description of Artificial Sequence: Synthetic polypeptide"
  source: /note="Synthetic: hu125B11.v26 light chain variable region (VL)"
DIQMTQSPSSLSASVGDRVTITCKASQNVGTAVAWYQQKPGKAPKLLIYSASIRYTGVPSRFSGSGSGTDFTLTISSLQPEDFATYFCQQFRTYPYTFGQGTKVEIK

SEQ ID NO: 13288 - protein, 107 aa, Artificial Sequence
  source: /note="Description of Artificial Sequence: Synthetic polypeptide"
  source: /note="Synthetic: hu125B11.v28 light chain variable region (VL)"
DIQMTQSPSSLSASVGDRVTITCKASQNVGTAVAWYQQKPGKAPKLLIYSASIRYTGVPSRFSGSGSGTDFTLTISSLQPEDFATYYCQQFRTYPYTFGQGTKVEIK

SEQ ID NO: 13289 - protein, 112 aa, Artificial Sequence
  source: /note="Description of Artificial Sequence: Synthetic polypeptide"
  source: /note="Synthetic: Hu37D3-H9.v28.A4 light chain variable region (VL)"
DDVLTQTPLSLPVTPGQPASISCRSSQSIVHSNGNTYLEWYLQKPGQSPQLLIYKVSNRFSGVPDRFSGSGSGTDFTLKISRVEAEDVGVYYCFQGSLVPWTFGQGTKVEIK

SEQ ID NO: 13290 - protein, 444 aa, Artificial Sequence
  source: /note="Description of Artificial Sequence: Synthetic polypeptide"
  source: /note="Synthetic: Hu37D3-H9.v28.A4 IgG4-S228P.YTE heavy chain"
EVQLVESGGGLVQPGGSLRLSCAASGLIFRSYGMSWVRQAPGKGLEWVATINSGGTYTYYPDSVKGRFTISRDNSKNTLYLQMNSLRAEDTAVYYCANSYSGAMDYWGQGTLVTVSSASTKGPSVFPLAPCSRSTSESTAALGCLVKDYFPEPVTVSWNSGALTSGVHTFPAVLQSSGLYSLSSVVTVPSSSLGTKTYTCNVDHKPSNTKVDKRVESKYGPPCPPCPAPEFLGGPSVFLFPPKPKDTLYITREPEVTCVVVDVSQEDPEVQFNWYVDGVEVHNAKTKPREEQFNSTYRVVSVLTVLHQDWLNGKEYKCKVSNKGLPSSIEKTISKAKGQPREPQVYTLPPSQEEMTKNQVSLTCLVKGFYPSDIAVEWESNGQPENNYKTTPPVLDSDGSFFLYSRLTVDKSRWQEGNVFSCSVMHEALHNHYTQKSLSLSLGK

SEQ ID NO: 13291 - protein, 219 aa, Artificial Sequence
  source: /note="Description of Artificial Sequence: Synthetic polypeptide"
  source: /note="Synthetic: Hu37D3-H9.v28.A4 IgG4-S228P.YTE light chain"
DDVLTQTPLSLPVTPGQPASISCRSSQSIVHSNGNTYLEWYLQKPGQSPQLLIYKVSNRFSGVPDRFSGSGSGTDFTLKISRVEAEDVGVYYCFQGSLVPWTFGQGTKVEIKRTVAAPSVFIFPPSDEQLKSGTASVVCLLNNFYPREAKVQWKVDNALQSGNSQESVTEQDSKDSTYSLSSTLTLSKADYEKHKVYACEVTHQGLSSPVTKSFNRGEC

SEQ ID NO: 13292 - protein, 107 aa, Artificial Sequence
  source: /note="Description of Artificial Sequence: Synthetic polypeptide"
  source: /note="Synthetic: hu125B11-H3.LC3"
DIQMTQSPSSLSASVGDRVTITCKASQNVGTAVAWYQQKPGKSPKLLIYSASIRYTGVPSRFSGSGSGTDFTLTISSLQPEDFATYYCQQFRTYPYTFGQGTKVEIK

SEQ ID NO: 13293 - protein, 115 aa, Artificial Sequence
  source: /note="Description of Artificial Sequence: Synthetic polypeptide"
  source: /note="Synthetic: hu125B11-H3.HC1"
EVQLVESGGGLVQPGGSLRLSCAASRFIFSNYWMNWVRQAPGKGLEWVAQIRLKSDNYATHYAESVKGRFTISRDDSKNTVYLQMNSLRAEDTAVYYCTGGTTYWGQGTLVTVSS

SEQ ID NO: 13294 - protein, 115 aa, Artificial Sequence
  source: /note="Description of Artificial Sequence: Synthetic polypeptide"
  source: /note="Synthetic: hu125B11-H3.HC2"
EVQLVESGGGLVQPGGSLRLSCAASRFIFSNYWMNWVRQAPGKGLEWVAQIRLKSDNYATHYAESVKGRFTISRDNSKNTVYLQMNSLRAEDTAVYYCTGGTTYWGQGTLVTVSS

SEQ ID NO: 13295 - protein, 115 aa, Artificial Sequence
  source: /note="Description of Artificial Sequence: Synthetic polypeptide"
  source: /note="Synthetic: hu125B11-H3.HC5"
EVQLVESGGGLVQPGGSLRLSCAASRFIFSNYYMNWVRQAPGKGLEWVAQIRLKSDNYATHYAESVKGRFTISRDDSKNTVYLQMNSLRAEDTAVYYCTGGTTYWGQGTLVTVSS

SEQ ID NO: 13296 - protein, 115 aa, Artificial Sequence
  source: /note="Description of Artificial Sequence: Synthetic polypeptide"
  source: /note="Synthetic: hu125B11-H3.HC6"
EVQLVESGGGLVQPGGSLRLSCAASRFIFSNYFMNWVRQAPGKGLEWVAQIRLKSDNYATHYAESVKGRFTISRDDSKNTVYLQMNSLRAEDTAVYYCTGGTTYWGQGTLVTVSS

SEQ ID NO: 13297 - protein, 113 aa, Artificial Sequence
  source: /note="Description of Artificial Sequence: Synthetic polypeptide"
  source: /note="Synthetic: Hu94B2.HC2"
EVQLVQSGAEVKKPGASVKVSCKASGYSLTGYTMNWVRQAPGQGLEWIGLISPYNGVTSYNQKFKGRVTLTVDKSTSTAYLELSSLRSEDTAVYYCARQGAYWGQGTLVTVSS

SEQ ID NO: 13298 - protein, 113 aa, Artificial Sequence
  source: /note="Description of Artificial Sequence: Synthetic polypeptide"
  source: /note="Synthetic: Hu94B2.HC3"
EVQLVQSGAEVKKPGASVKVSCKASGYSLTGYTMNWVRQAPGQGLEWIGLISPYNGVTSYNQKFKGRATITVDKSTSTAYLELSSLRSEDTAVYYCARQGAYWGQGTLVTVSS

SEQ ID NO: 13299 - protein, 113 aa, Artificial Sequence
  source: /note="Description of Artificial Sequence: Synthetic polypeptide"
  source: /note="Synthetic: Hu94B2.HC4"
EVQLVQSGAEVKKPGASVKVSCKASGYSLTGYTMNWVRQAPGQGLEWIGLISPYNGVTSYNQKFKGRATLTRDKSTSTAYLELSSLRSEDTAVYYCARQGAYWGQGTLVTVSS

SEQ ID NO: 13300 - protein, 113 aa, Artificial Sequence
  source: /note="Description of Artificial Sequence: Synthetic polypeptide"
  source: /note="Synthetic: Hu94B2.HC5"
EVQLVQSGAEVKKPGASVKVSCKASGYSLTGYTMNWVRQAPGQGLEWIGLISPYNGVTSYNQKFKGRATLTVDTSTSTAYLELSSLRSEDTAVYYCARQGAYWGQGTLVTVSS

SEQ ID NO: 13301 - protein, 113 aa, Artificial Sequence
  source: /note="Description of Artificial Sequence: Synthetic polypeptide"
  source: /note="Synthetic: Hu94B2.HC6"
EVQLVQSGAEVKKPGASVKVSCKASGYSLTGYTMNWVRQAPGQGLEWIGLISPYNGVTSYNQKFKGRVTITVDKSTSTAYLELSSLRSEDTAVYYCARQGAYWGQGTLVTVSS

SEQ ID NO: 13302 - protein, 113 aa, Artificial Sequence
  source: /note="Description of Artificial Sequence: Synthetic polypeptide"
  source: /note="Synthetic: Hu94B2.HC7"
EVQLVQSGAEVKKPGASVKVSCKASGYSLTGYTMNWVRQAPGQGLEWIGLISPYNGVTSYNQKFKGRVTITRDKSTSTAYLELSSLRSEDTAVYYCARQGAYWGQGTLVTVSS

SEQ ID NO: 13303 - protein, 113 aa, Artificial Sequence
  source: /note="Description of Artificial Sequence: Synthetic polypeptide"
  source: /note="Synthetic: Hu94B2.HC8"
EVQLVQSGAEVKKPGASVKVSCKASGYSLTGYTMNWVRQAPGQGLEWIGLISPYNGVTSYNQKFKGRVTITVDTSTSTAYLELSSLRSEDTAVYYCARQGAYWGQGTLVTVSS

SEQ ID NO: 13304 - protein, 112 aa, Artificial Sequence
  source: /note="Description of Artificial Sequence: Synthetic polypeptide"
  source: /note="Synthetic: Hu94B2.LC9"
DVVMTQTPLSLPVTPGQPASISCKSSQSLLDSDGKTYLNWLLQKPGQSPQRLIYLVSKLDSGVPDRFSGSGSGTDFTLKISRVEAEDVGVYYCWQGTHFPWTFGQGTKVEIK

SEQ ID NO: 13305 - protein, 112 aa, Artificial Sequence
  source: /note="Description of Artificial Sequence: Synthetic polypeptide"
  source: /note="Synthetic: Hu94B2.LC10"
DVVMTQTPLSLPVTPGQPASISCKSSQSLLDSDGKTYLNWLLQKPGQSPQLLIYLVSKLDSGVPDRFSGSGSGTDFTLKISRVEAEDVGVYYCWQGTHFPWTFGQGTKVEIK

SEQ ID NO: 13306 - protein, 112 aa, Artificial Sequence
  source: /note="Description of Artificial Sequence: Synthetic polypeptide"
  source: /note="Synthetic: Hu94B2.LC11"
DVVMTQTPLSLPVTPGQPASISCKSSQSLLDSDGKTYLNWYLQKPGQSPQRLIYLVSKLDSGVPDRFSGSGSGTDFTLKISRVEAEDVGVYYCWQGTHFPWTFGQGTKVEIK

SEQ ID NO: 13307 - protein, 112 aa, Artificial Sequence
  source: /note="Description of Artificial Sequence: Synthetic polypeptide"
  source: /note="Synthetic: Hu94B2.LC12"
DVVMTQTPLSLPVTPGQPASISCKSSQSLLDSDGKTYLNWYLQKPGQSPQLLIYLVSKLDSGVPDRFSGSGSGTDFTLKISRVEAEDVGVYYCWQGTHFPWTFGQGTKVEIK

SEQ ID NO: 13308 - protein, 112 aa, Artificial Sequence
  source: /note="Description of Artificial Sequence: Synthetic polypeptide"
  source: /note="Synthetic: Hu94B2.LC14"
DIVMTQTPLSLPVTPGQPASISCKSSQSLLDSDGKTYLNWLLQKPGQSPQLLIYLVSKLDSGVPDRFSGSGSGTDFTLKISRVEAEDVGVYYCWQGTHFPWTFGQGTKVEIK

SEQ ID NO: 13309 - protein, 112 aa, Artificial Sequence
  source: /note="Description of Artificial Sequence: Synthetic polypeptide"
  source: /note="Synthetic: Hu94B2.LC15"
DIVMTQTPLSLPVTPGQPASISCKSSQSLLDSDGKTYLNWYLQKPGQSPQRLIYLVSKLDSGVPDRFSGSGSGTDFTLKISRVEAEDVGVYYCWQGTHFPWTFGQGTKVEIK

SEQ ID NO: 13310 - protein, 112 aa, Artificial Sequence
  source: /note="Description of Artificial Sequence: Synthetic polypeptide"
  source: /note="Synthetic: Hu94B2.LC16"
DIVMTQTPLSLPVTPGQPASISCKSSQSLLDSDGKTYLNWYLQKPGQSPQLLIYLVSKLDSGVPDRFSGSGSGTDFTLKISRVEAEDVGVYYCWQGTHFPWTFGQGTKVEIK

SEQ ID NO: 13311 - protein, 112 aa, Artificial Sequence
  source: /note="Description of Artificial Sequence: Synthetic polypeptide"
  source: /note="Synthetic: Hu37D3.v39 light chain variable region (VL)"
EDQLTQSPSSLSASVGDRVTITCRSSQSIVHSNGNTYLEWYQQKPGKSPKLLIYKVSNRFSGVPSRFSGSGSGTDFTLTISSLQPEDFATYYCFQGSLVPWTFGQGTKVEIK

SEQ ID NO: 13312 - protein, 219 aa, Artificial Sequence
  source: /note="Description of Artificial Sequence: Synthetic polypeptide"
  source: /note="Synthetic: Hu37D3.v39 IgG4-S228P.YTE light chain"
EDQLTQSPSSLSASVGDRVTITCRSSQSIVHSNGNTYLEWYQQKPGKSPKLLIYKVSNRFSGVPSRFSGSGSGTDFTLTISSLQPEDFATYYCFQGSLVPWTFGQGTKVEIKRTVAAPSVFIFPPSDEQLKSGTASVVCLLNNFYPREAKVQWKVDNALQSGNSQESVTEQDSKDSTYSLSSTLTLSKADYEKHKVYACEVTHQGLSSPVTKSFNRGEC

SEQ ID NO: 13313 - protein, 112 aa, Artificial Sequence
  source: /note="Description of Artificial Sequence: Synthetic polypeptide"
  source: /note="Synthetic: Hu37D3.v40 light chain variable region (VL)"
EDQLTQSPSSLSASVGDRVTITCRSSQSIVHSNTNTYFEWYQQKPGKSPKLLIYKVSNRFSGVPSRFSGSGSGTDFTLTISSLQPEDFATYYCFQGSLVPWTFGQGTKVEIK

SEQ ID NO: 13314 - protein, 219 aa, Artificial Sequence
  source: /note="Description of Artificial Sequence: Synthetic polypeptide"
  source: /note="Synthetic: Hu37D3.v40 IgG4-S228P.YTE light chain"
EDQLTQSPSSLSASVGDRVTITCRSSQSIVHSNTNTYFEWYQQKPGKSPKLLIYKVSNRFSGVPSRFSGSGSGTDFTLTISSLQPEDFATYYCFQGSLVPWTFGQGTKVEIKRTVAAPSVFIFPPSDEQLKSGTASVVCLLNNFYPREAKVQWKVDNALQSGNSQESVTEQDSKDSTYSLSSTLTLSKADYEKHKVYACEVTHQGLSSPVTKSFNRGEC

SEQ ID NO: 13315 - protein, 112 aa, Artificial Sequence
  source: /note="Description of Artificial Sequence: Synthetic polypeptide"
  source: /note="Synthetic: Hu37D3.v41 light chain variable region (VL)"
EDQLTQSPSSLSASVGDRVTITCRSSQSIVHSNGQTYFEWYQQKPGKSPKLLIYKVSNRFSGVPSRFSGSGSGTDFTLTISSLQPEDFATYYCFQGSLVPWTFGQGTKVEIK

SEQ ID NO: 13316 - protein, 219 aa, Artificial Sequence
  source: /note="Description of Artificial Sequence: Synthetic polypeptide"
  source: /note="Synthetic: Hu37D3.v41 IgG4-S228P.YTE light chain"
EDQLTQSPSSLSASVGDRVTITCRSSQSIVHSNGQTYFEWYQQKPGKSPKLLIYKVSNRFSGVPSRFSGSGSGTDFTLTISSLQPEDFATYYCFQGSLVPWTFGQGTKVEIKRTVAAPSVFIFPPSDEQLKSGTASVVCLLNNFYPREAKVQWKVDNALQSGNSQESVTEQDSKDSTYSLSSTLTLSKADYEKHKVYACEVTHQGLSSPVTKSFNRGEC

SEQ ID NO: 13317 - protein, 444 aa, Artificial Sequence
  source: /note="Description of Artificial Sequence: Synthetic polypeptide"
  source: /note="Synthetic: Hu37D3-H9.v1 IgG4 heavy chain"
EVQLVESGGGLVQPGGSLRLSCAASGLIFRSYGMSWVRQAPGKGLEWVATINSGGTYTYYPDSVKGRFTISRDNSKNTLYLQMNSLRAEDTAVYYCANSYSGAMDYWGQGTLVTVSSASTKGPSVFPLAPCSRSTSESTAALGCLVKDYFPEPVTVSWNSGALTSGVHTFPAVLQSSGLYSLSSVVTVPSSSLGTKTYTCNVDHKPSNTKVDKRVESKYGPPCPPCPAPEFLGGPSVFLFPPKPKDTLMISRTPEVTCVVVDVSQEDPEVQFNWYVDGVEVHNAKTKPREEQFNSTYRVVSVLTVLHQDWLNGKEYKCKVSNKGLPSSIEKTISKAKGQPREPQVYTLPPSQEEMTKNQVSLTCLVKGFYPSDIAVEWESNGQPENNYKTTPPVLDSDGSFFLYSRLTVDKSRWQEGNVFSCSVMHEALHNHYTQKSLSLSLGK

SEQ ID NO: 13318 - protein, 107 aa, Artificial Sequence
  source: /note="Description of Artificial Sequence: Synthetic polypeptide"
  source: /note="Synthetic: hu113F5-F7.LC1"
DIQMTQSPSSLSASVGDRVTITCKASQNVGTAVAWYQQKPGKSPKLLIYSASRRFSGVPSRFSGSGSGTDFTLTISSLQPEDFATYFCQQFSTYPYTFGQGTKVEIK

SEQ ID NO: 13319 - protein, 107 aa, Artificial Sequence
  source: /note="Description of Artificial Sequence: Synthetic polypeptide"
  source: /note="Synthetic: hu113F5-F7.LC2"
DIQMTQSPSSLSASVGDRVTITCKASQNVGTAVAWYQQKPGKAPKLLIYSASRRFSGVPSRFSGSGSGTDFTLTISSLQPEDFATYFCQQFSTYPYTFGQGTKVEIK

SEQ ID NO: 13320 - protein, 107 aa, Artificial Sequence
  source: /note="Description of Artificial Sequence: Synthetic polypeptide"
  source: /note="Synthetic: hu113F5-F7.LC3"
DIQMTQSPSSLSASVGDRVTITCKASQNVGTAVAWYQQKPGKSPKLLIYSASRRFSGVPSRFSGSGSGTDFTLTISSLQPEDFATYYCQQFSTYPYTFGQGTKVEIK

SEQ ID NO: 13321 - protein, 107 aa, Artificial Sequence
  source: /note="Description of Artificial Sequence: Synthetic polypeptide"
  source: /note="Synthetic: hu113F5-F7.LC4"
DIQMTQSPSSLSASVGDRVTITCKASQNVGTAVAWYQQKPGKAPKLLIYSASRRFSGVPSRFSGSGSGTDFTLTISSLQPEDFATYYCQQFSTYPYTFGQGTKVEIK

SEQ ID NO: 13322 - protein, 443 aa, Artificial Sequence
  source: /note="Description of Artificial Sequence: Synthetic polypeptide"
  source: /note="Synthetic: Hu37D3-H9.v28.A4 IgG4-S228P.YTE des-K heavy chain"
EVQLVESGGGLVQPGGSLRLSCAASGLIFRSYGMSWVRQAPGKGLEWVATINSGGTYTYYPDSVKGRFTISRDNSKNTLYLQMNSLRAEDTAVYYCANSYSGAMDYWGQGTLVTVSSASTKGPSVFPLAPCSRSTSESTAALGCLVKDYFPEPVTVSWNSGALTSGVHTFPAVLQSSGLYSLSSVVTVPSSSLGTKTYTCNVDHKPSNTKVDKRVESKYGPPCPPCPAPEFLGGPSVFLFPPKPKDTLYITREPEVTCVVVDVSQEDPEVQFNWYVDGVEVHNAKTKPREEQFNSTYRVVSVLTVLHQDWLNGKEYKCKVSNKGLPSSIEKTISKAKGQPREPQVYTLPPSQEEMTKNQVSLTCLVKGFYPSDIAVEWESNGQPENNYKTTPPVLDSDGSFFLYSRLTVDKSRWQEGNVFSCSVMHEALHNHYTQKSLSLSLG

SEQ ID NO: 13323 - protein, 169 aa, Artificial Sequence
  source: /note="Description of Artificial Sequence: Synthetic polypeptide"
MGWSCIILILVAAATGVHSQVQLLQPGAELVKPGASVIMSCKASGYTFTTYWITWVKQRPGQGLEWIGDIYPGSSICNYNEKFKSKATLTVDTSSSTAYMQLNSLTSEDSAVYYCAREDGYDAWFAYWGQGTLVTVSAAKTTPPSVYPLAPGCGDTTGSSVTLGCLVKG

SEQ ID NO: 13324 - protein, 150 aa, Artificial Sequence
  source: /note="Description of Artificial Sequence: Synthetic polypeptide"
QVQLLQPGAELVKPGASVIMSCKASGYTFTTYWITWVKQRPGQGLEWIGDIYPGSSICNYNEKFKSKATLTVDTSSSTAYMQLNSLTSEDSAVYYCAREDGYDAWFAYWGQGTLVTVSAAKTTPPSVYPLAPGCGDTTGSSVTLGCLVKG

SEQ ID NO: 13325 - protein, 119 aa, Artificial Sequence
  source: /note="Description of Artificial Sequence: Synthetic polypeptide"
QVQLLQPGAELVKPGASVIMSCKASGYTFTTYWITWVKQRPGQGLEWIGDIYPGSSICNYNEKFKSKATLTVDTSSSTAYMQLNSLTSEDSAVYYCAREDGYDAWFAYWGQGTLVTVSA

SEQ ID NO: 13326 - protein, 468 aa, Artificial Sequence
  source: /note="Description of Artificial Sequence: Synthetic polypeptide"
MGWSCIILFLVATATGVHSQVQLVQSGAEVKKPGASVKVSCKASGYTFTTYWITWVRQAPGQGLEWMGDIYPGSSICNYNEKFKSRVTMTRDTSTSTVYMELSSLRSEDTAVYYCAREDGYDAWFAYWGQGTLVTVSSASTKGPSVFPLAPSSKSTSGGTAALGCLVKDYFPEPVTVSWNSGALTSGVHTFPAVLQSSGLYSLSSVVTVPSSSLGTQTYICNVNHKPSNTKVDKKVEPKSCDKTHTCPPCPAPELLGGPSVFLFPPKPKDTLMISRTPEVTCVVVDVSHEDPEVKFNWYVDGVEVHNAKTKPREEQYNSTYRVVSVLTVLHQDWLNGKEYKCKVSNKALPAPIEKTISKAKGQPREPQVYTLPPSRDELTKNQVSLTCLVKGFYPSDIAVEWESNGQPENNYKTTPPVLDSDGSFFLYSKLTVDKSRWQQGNVFSCSVMHEALHNHYTQKSLSLSPGK

SEQ ID NO: 13327 - protein, 449 aa, Artificial Sequence
  source: /note="Description of Artificial Sequence: Synthetic polypeptide"
QVQLVQSGAEVKKPGASVKVSCKASGYTFTTYWITWVRQAPGQGLEWMGDIYPGSSICNYNEKFKSRVTMTRDTSTSTVYMELSSLRSEDTAVYYCAREDGYDAWFAYWGQGTLVTVSSASTKGPSVFPLAPSSKSTSGGTAALGCLVKDYFPEPVTVSWNSGALTSGVHTFPAVLQSSGLYSLSSVVTVPSSSLGTQTYICNVNHKPSNTKVDKKVEPKSCDKTHTCPPCPAPELLGGPSVFLFPPKPKDTLMISRTPEVTCVVVDVSHEDPEVKFNWYVDGVEVHNAKTKPREEQYNSTYRVVSVLTVLHQDWLNGKEYKCKVSNKALPAPIEKTISKAKGQPREPQVYTLPPSRDELTKNQVSLTCLVKGFYPSDIAVEWESNGQPENNYKTTPPVLDSDGSFFLYSKLTVDKSRWQQGNVFSCSVMHEALHNHYTQKSLSLSPGK

SEQ ID NO: 13328 - protein, 119 aa, Artificial Sequence
  source: /note="Description of Artificial Sequence: Synthetic polypeptide"
QVQLVQSGAEVKKPGASVKVSCKASGYTFTTYWITWVRQAPGQGLEWMGDIYPGSSICNYNEKFKSRVTMTRDTSTSTVYMELSSLRSEDTAVYYCAREDGYDAWFAYWGQGTLVTVSS

SEQ ID NO: 13329 - protein, 468 aa, Artificial Sequence
  source: /note="Description of Artificial Sequence: Synthetic polypeptide"
MGWSCIILFLVATATGVHSQVQLVQSGAEVKKPGASVKVSCKASGYTFTTYWITWVRQAPGQGLEWMGDIYPGSSICNYNEKFKSRVTMTVDTSTSTVYMELSSLRSEDTAVYYCAREDGYDAWFAYWGQGTLVTVSSASTKGPSVFPLAPSSKSTSGGTAALGCLVKDYFPEPVTVSWNSGALTSGVHTFPAVLQSSGLYSLSSVVTVPSSSLGTQTYICNVNHKPSNTKVDKKVEPKSCDKTHTCPPCPAPELLGGPSVFLFPPKPKDTLMISRTPEVTCVVVDVSHEDPEVKFNWYVDGVEVHNAKTKPREEQYNSTYRVVSVLTVLHQDWLNGKEYKCKVSNKALPAPIEKTISKAKGQPREPQVYTLPPSRDELTKNQVSLTCLVKGFYPSDIAVEWESNGQPENNYKTTPPVLDSDGSFFLYSKLTVDKSRWQQGNVFSCSVMHEALHNHYTQKSLSLSPGK

SEQ ID NO: 13330 - protein, 449 aa, Artificial Sequence
  source: /note="Description of Artificial Sequence: Synthetic polypeptide"
QVQLVQSGAEVKKPGASVKVSCKASGYTFTTYWITWVRQAPGQGLEWMGDIYPGSSICNYNEKFKSRVTMTVDTSTSTVYMELSSLRSEDTAVYYCAREDGYDAWFAYWGQGTLVTVSSASTKGPSVFPLAPSSKSTSGGTAALGCLVKDYFPEPVTVSWNSGALTSGVHTFPAVLQSSGLYSLSSVVTVPSSSLGTQTYICNVNHKPSNTKVDKKVEPKSCDKTHTCPPCPAPELLGGPSVFLFPPKPKDTLMISRTPEVTCVVVDVSHEDPEVKFNWYVDGVEVHNAKTKPREEQYNSTYRVVSVLTVLHQDWLNGKEYKCKVSNKALPAPIEKTISKAKGQPREPQVYTLPPSRDELTKNQVSLTCLVKGFYPSDIAVEWESNGQPENNYKTTPPVLDSDGSFFLYSKLTVDKSRWQQGNVFSCSVMHEALHNHYTQKSLSLSPGK

SEQ ID NO: 13331 - protein, 119 aa, Artificial Sequence
  source: /note="Description of Artificial Sequence: Synthetic polypeptide"
QVQLVQSGAEVKKPGASVKVSCKASGYTFTTYWITWVRQAPGQGLEWMGDIYPGSSICNYNEKFKSRVTMTVDTSTSTVYMELSSLRSEDTAVYYCAREDGYDAWFAYWGQGTLVTVSS

SEQ ID NO: 13332 - protein, 468 aa, Artificial Sequence
  source: /note="Description of Artificial Sequence: Synthetic polypeptide"
MGWSCIILFLVATATGVHSQVQLVQSGAEVKKPGASVKVSCKASGYTFTTYWITWVRQAPGQGLEWMGDIYPGSSICNYNEKFKSRVTMTVDTSTSTAYMELSSLRSEDTAVYYCAREDGYDAWFAYWGQGTLVTVSSASTKGPSVFPLAPSSKSTSGGTAALGCLVKDYFPEPVTVSWNSGALTSGVHTFPAVLQSSGLYSLSSVVTVPSSSLGTQTYICNVNHKPSNTKVDKKVEPKSCDKTHTCPPCPAPELLGGPSVFLFPPKPKDTLMISRTPEVTCVVVDVSHEDPEVKFNWYVDGVEVHNAKTKPREEQYNSTYRVVSVLTVLHQDWLNGKEYKCKVSNKALPAPIEKTISKAKGQPREPQVYTLPPSRDELTKNQVSLTCLVKGFYPSDIAVEWESNGQPENNYKTTPPVLDSDGSFFLYSKLTVDKSRWQQGNVFSCSVMHEALHNHYTQKSLSLSPGK

SEQ ID NO: 13333 - protein, 449 aa, Artificial Sequence
  source: /note="Description of Artificial Sequence: Synthetic polypeptide"
QVQLVQSGAEVKKPGASVKVSCKASGYTFTTYWITWVRQAPGQGLEWMGDIYPGSSICNYNEKFKSRVTMTVDTSTSTAYMELSSLRSEDTAVYYCAREDGYDAWFAYWGQGTLVTVSSASTKGPSVFPLAPSSKSTSGGTAALGCLVKDYFPEPVTVSWNSGALTSGVHTFPAVLQSSGLYSLSSVVTVPSSSLGTQTYICNVNHKPSNTKVDKKVEPKSCDKTHTCPPCPAPELLGGPSVFLFPPKPKDTLMISRTPEVTCVVVDVSHEDPEVKFNWYVDGVEVHNAKTKPREEQYNSTYRVVSVLTVLHQDWLNGKEYKCKVSNKALPAPIEKTISKAKGQPREPQVYTLPPSRDELTKNQVSLTCLVKGFYPSDIAVEWESNGQPENNYKTTPPVLDSDGSFFLYSKLTVDKSRWQQGNVFSCSVMHEALHNHYTQKSLSLSPGK

SEQ ID NO: 13334 - protein, 119 aa, Artificial Sequence
  source: /note="Description of Artificial Sequence: Synthetic polypeptide"
QVQLVQSGAEVKKPGASVKVSCKASGYTFTTYWITWVRQAPGQGLEWMGDIYPGSSICNYNEKFKSRVTMTVDTSTSTAYMELSSLRSEDTAVYYCAREDGYDAWFAYWGQGTLVTVSS

SEQ ID NO: 13335 - protein, 468 aa, Artificial Sequence
  source: /note="Description of Artificial Sequence: Synthetic polypeptide"
MGWSCIILFLVATATGVHSQVQLVQSGAEVKKPGASVKVSCKASGYTFTTYWITWVRQAPGQGLEWMGDIYPGSSICNYAQKFQGRVTMTVDTSTSTAYMELSSLRSEDTAVYYCAREDGYDAWFAYWGQGTLVTVSSASTKGPSVFPLAPSSKSTSGGTAALGCLVKDYFPEPVTVSWNSGALTSGVHTFPAVLQSSGLYSLSSVVTVPSSSLGTQTYICNVNHKPSNTKVDKKVEPKSCDKTHTCPPCPAPELLGGPSVFLFPPKPKDTLMISRTPEVTCVVVDVSHEDPEVKFNWYVDGVEVHNAKTKPREEQYNSTYRVVSVLTVLHQDWLNGKEYKCKVSNKALPAPIEKTISKAKGQPREPQVYTLPPSRDELTKNQVSLTCLVKGFYPSDIAVEWESNGQPENNYKTTPPVLDSDGSFFLYSKLTVDKSRWQQGNVFSCSVMHEALHNHYTQKSLSLSPGK

SEQ ID NO: 13336 - protein, 449 aa, Artificial Sequence
  source: /note="Description of Artificial Sequence: Synthetic polypeptide"
QVQLVQSGAEVKKPGASVKVSCKASGYTFTTYWITWVRQAPGQGLEWMGDIYPGSSICNYAQKFQGRVTMTVDTSTSTAYMELSSLRSEDTAVYYCAREDGYDAWFAYWGQGTLVTVSSASTKGPSVFPLAPSSKSTSGGTAALGCLVKDYFPEPVTVSWNSGALTSGVHTFPAVLQSSGLYSLSSVVTVPSSSLGTQTYICNVNHKPSNTKVDKKVEPKSCDKTHTCPPCPAPELLGGPSVFLFPPKPKDTLMISRTPEVTCVVVDVSHEDPEVKFNWYVDGVEVHNAKTKPREEQYNSTYRVVSVLTVLHQDWLNGKEYKCKVSNKALPAPIEKTISKAKGQPREPQVYTLPPSRDELTKNQVSLTCLVKGFYPSDIAVEWESNGQPENNYKTTPPVLDSDGSFFLYSKLTVDKSRWQQGNVFSCSVMHEALHNHYTQKSLSLSPGK

SEQ ID NO: 13337 - protein, 119 aa, Artificial Sequence
  source: /note="Description of Artificial Sequence: Synthetic polypeptide"
QVQLVQSGAEVKKPGASVKVSCKASGYTFTTYWITWVRQAPGQGLEWMGDIYPGSSICNYAQKFQGRVTMTVDTSTSTAYMELSSLRSEDTAVYYCAREDGYDAWFAYWGQGTLVTVSS

SEQ ID NO: 13338 - protein, 468 aa, Artificial Sequence
  source: /note="Description of Artificial Sequence: Synthetic polypeptide"
MGWSCIILFLVATATGVHSQVQLVQSGAEVKKPGASVKVSCKASGYTFTTYWITWVRQAPGQGLEWMGDIYPGSSISNYNEKFKSRVTMTVDTSTSTAYMELSSLRSEDTAVYYCAREDGYDAWFAYWGQGTLVTVSSASTKGPSVFPLAPSSKSTSGGTAALGCLVKDYFPEPVTVSWNSGALTSGVHTFPAVLQSSGLYSLSSVVTVPSSSLGTQTYICNVNHKPSNTKVDKKVEPKSCDKTHTCPPCPAPELLGGPSVFLFPPKPKDTLMISRTPEVTCVVVDVSHEDPEVKFNWYVDGVEVHNAKTKPREEQYNSTYRVVSVLTVLHQDWLNGKEYKCKVSNKALPAPIEKTISKAKGQPREPQVYTLPPSRDELTKNQVSLTCLVKGFYPSDIAVEWESNGQPENNYKTTPPVLDSDGSFFLYSKLTVDKSRWQQGNVFSCSVMHEALHNHYTQKSLSLSPGK

SEQ ID NO: 13339 - protein, 449 aa, Artificial Sequence
  source: /note="Description of Artificial Sequence: Synthetic polypeptide"
QVQLVQSGAEVKKPGASVKVSCKASGYTFTTYWITWVRQAPGQGLEWMGDIYPGSSISNYNEKFKSRVTMTVDTSTSTAYMELSSLRSEDTAVYYCAREDGYDAWFAYWGQGTLVTVSSASTKGPSVFPLAPSSKSTSGGTAALGCLVKDYFPEPVTVSWNSGALTSGVHTFPAVLQSSGLYSLSSVVTVPSSSLGTQTYICNVNHKPSNTKVDKKVEPKSCDKTHTCPPCPAPELLGGPSVFLFPPKPKDTLMISRTPEVTCVVVDVSHEDPEVKFNWYVDGVEVHNAKTKPREEQYNSTYRVVSVLTVLHQDWLNGKEYKCKVSNKALPAPIEKTISKAKGQPREPQVYTLPPSRDELTKNQVSLTCLVKGFYPSDIAVEWESNGQPENNYKTTPPVLDSDGSFFLYSKLTVDKSRWQQGNVFSCSVMHEALHNHYTQKSLSLSPGK

SEQ ID NO: 13340 - protein, 119 aa, Artificial Sequence
  source: /note="Description of Artificial Sequence: Synthetic polypeptide"
QVQLVQSGAEVKKPGASVKVSCKASGYTFTTYWITWVRQAPGQGLEWMGDIYPGSSISNYNEKFKSRVTMTVDTSTSTAYMELSSLRSEDTAVYYCAREDGYDAWFAYWGQGTLVTVSS

SEQ ID NO: 13341 - protein, 468 aa, Artificial Sequence
  source: /note="Description of Artificial Sequence: Synthetic polypeptide"
MGWSCIILFLVATATGVHSQVQLVQSGAEVKKPGASVKVSCKASGYTFTTYWITWVRQAPGQGLEWMGDIYPGSSISNYNEKFKSRVTMTVDTSTSTVYMELSSLRSEDTAVYYCAREDGYDAWFAYWGQGTLVTVSSASTKGPSVFPLAPSSKSTSGGTAALGCLVKDYFPEPVTVSWNSGALTSGVHTFPAVLQSSGLYSLSSVVTVPSSSLGTQTYICNVNHKPSNTKVDKKVEPKSCDKTHTCPPCPAPELLGGPSVFLFPPKPKDTLMISRTPEVTCVVVDVSHEDPEVKFNWYVDGVEVHNAKTKPREEQYNSTYRVVSVLTVLHQDWLNGKEYKCKVSNKALPAPIEKTISKAKGQPREPQVYTLPPSRDELTKNQVSLTCLVKGFYPSDIAVEWESNGQPENNYKTTPPVLDSDGSFFLYSKLTVDKSRWQQGNVFSCSVMHEALHNHYTQKSLSLSPGK

SEQ ID NO: 13342 - protein, 449 aa, Artificial Sequence
  source: /note="Description of Artificial Sequence: Synthetic polypeptide"
QVQLVQSGAEVKKPGASVKVSCKASGYTFTTYWITWVRQAPGQGLEWMGDIYPGSSISNYNEKFKSRVTMTVDTSTSTVYMELSSLRSEDTAVYYCAREDGYDAWFAYWGQGTLVTVSSASTKGPSVFPLAPSSKSTSGGTAALGCLVKDYFPEPVTVSWNSGALTSGVHTFPAVLQSSGLYSLSSVVTVPSSSLGTQTYICNVNHKPSNTKVDKKVEPKSCDKTHTCPPCPAPELLGGPSVFLFPPKPKDTLMISRTPEVTCVVVDVSHEDPEVKFNWYVDGVEVHNAKTKPREEQYNSTYRVVSVLTVLHQDWLNGKEYKCKVSNKALPAPIEKTISKAKGQPREPQVYTLPPSRDELTKNQVSLTCLVKGFYPSDIAVEWESNGQPENNYKTTPPVLDSDGSFFLYSKLTVDKSRWQQGNVFSCSVMHEALHNHYTQKSLSLSPGK

SEQ ID NO: 13343 - protein, 119 aa, Artificial Sequence
  source: /note="Description of Artificial Sequence: Synthetic polypeptide"
QVQLVQSGAEVKKPGASVKVSCKASGYTFTTYWITWVRQAPGQGLEWMGDIYPGSSISNYNEKFKSRVTMTVDTSTSTVYMELSSLRSEDTAVYYCAREDGYDAWFAYWGQGTLVTVSS

SEQ ID NO: 13344 - protein, 468 aa, Artificial Sequence
  source: /note="Description of Artificial Sequence: Synthetic polypeptide"
MGWSCIILFLVATATGVHSQVQLVQSGAEVKKPGASVKVSCKASGYTFTTYWITWVRQAPGQGLEWMGDIYPGSSISNYAQKFQGRVTMTVDTSTSTVYMELSSLRSEDTAVYYCAREDGYDAWFAYWGQGTLVTVSSASTKGPSVFPLAPSSKSTSGGTAALGCLVKDYFPEPVTVSWNSGALTSGVHTFPAVLQSSGLYSLSSVVTVPSSSLGTQTYICNVNHKPSNTKVDKKVEPKSCDKTHTCPPCPAPELLGGPSVFLFPPKPKDTLMISRTPEVTCVVVDVSHEDPEVKFNWYVDGVEVHNAKTKPREEQYNSTYRVVSVLTVLHQDWLNGKEYKCKVSNKALPAPIEKTISKAKGQPREPQVYTLPPSRDELTKNQVSLTCLVKGFYPSDIAVEWESNGQPENNYKTTPPVLDSDGSFFLYSKLTVDKSRWQQGNVFSCSVMHEALHNHYTQKSLSLSPGK

SEQ ID NO: 13345 - protein, 449 aa, Artificial Sequence
  source: /note="Description of Artificial Sequence: Synthetic polypeptide"
QVQLVQSGAEVKKPGASVKVSCKASGYTFTTYWITWVRQAPGQGLEWMGDIYPGSSISNYAQKFQGRVTMTVDTSTSTVYMELSSLRSEDTAVYYCAREDGYDAWFAYWGQGTLVTVSSASTKGPSVFPLAPSSKSTSGGTAALGCLVKDYFPEPVTVSWNSGALTSGVHTFPAVLQSSGLYSLSSVVTVPSSSLGTQTYICNVNHKPSNTKVDKKVEPKSCDKTHTCPPCPAPELLGGPSVFLFPPKPKDTLMISRTPEVTCVVVDVSHEDPEVKFNWYVDGVEVHNAKTKPREEQYNSTYRVVSVLTVLHQDWLNGKEYKCKVSNKALPAPIEKTISKAKGQPREPQVYTLPPSRDELTKNQVSLTCLVKGFYPSDIAVEWESNGQPENNYKTTPPVLDSDGSFFLYSKLTVDKSRWQQGNVFSCSVMHEALHNHYTQKSLSLSPGK

SEQ ID NO: 13346 - protein, 119 aa, Artificial Sequence
  source: /note="Description of Artificial Sequence: Synthetic polypeptide"
QVQLVQSGAEVKKPGASVKVSCKASGYTFTTYWITWVRQAPGQGLEWMGDIYPGSSISNYAQKFQGRVTMTVDTSTSTVYMELSSLRSEDTAVYYCAREDGYDAWFAYWGQGTLVTVSS

SEQ ID NO: 13347 - protein, 468 aa, Artificial Sequence
  source: /note="Description of Artificial Sequence: Synthetic polypeptide"
MGWSCIILFLVATATGVHSQVQLVQSGAEVKKPGASVKVSCKASGYTFTTYWITWVRQAPGQGLEWMGDIYPGSSISNYAQKFQGRVTMTRDTSTSTVYMELSSLRSEDTAVYYCAREDGYDAWFAYWGQGTLVTVSSASTKGPSVFPLAPSSKSTSGGTAALGCLVKDYFPEPVTVSWNSGALTSGVHTFPAVLQSSGLYSLSSVVTVPSSSLGTQTYICNVNHKPSNTKVDKKVEPKSCDKTHTCPPCPAPELLGGPSVFLFPPKPKDTLMISRTPEVTCVVVDVSHEDPEVKFNWYVDGVEVHNAKTKPREEQYNSTYRVVSVLTVLHQDWLNGKEYKCKVSNKALPAPIEKTISKAKGQPREPQVYTLPPSRDELTKNQVSLTCLVKGFYPSDIAVEWESNGQPENNYKTTPPVLDSDGSFFLYSKLTVDKSRWQQGNVFSCSVMHEALHNHYTQKSLSLSPGK

SEQ ID NO: 13348 - protein, 449 aa, Artificial Sequence
  source: /note="Description of Artificial Sequence: Synthetic polypeptide"
QVQLVQSGAEVKKPGASVKVSCKASGYTFTTYWITWVRQAPGQGLEWMGDIYPGSSISNYAQKFQGRVTMTRDTSTSTVYMELSSLRSEDTAVYYCAREDGYDAWFAYWGQGTLVTVSSASTKGPSVFPLAPSSKSTSGGTAALGCLVKDYFPEPVTVSWNSGALTSGVHTFPAVLQSSGLYSLSSVVTVPSSSLGTQTYICNVNHKPSNTKVDKKVEPKSCDKTHTCPPCPAPELLGGPSVFLFPPKPKDTLMISRTPEVTCVVVDVSHEDPEVKFNWYVDGVEVHNAKTKPREEQYNSTYRVVSVLTVLHQDWLNGKEYKCKVSNKALPAPIEKTISKAKGQPREPQVYTLPPSRDELTKNQVSLTCLVKGFYPSDIAVEWESNGQPENNYKTTPPVLDSDGSFFLYSKLTVDKSRWQQGNVFSCSVMHEALHNHYTQKSLSLSPGK

SEQ ID NO: 13349 - protein, 119 aa, Artificial Sequence
  source: /note="Description of Artificial Sequence: Synthetic polypeptide"
QVQLVQSGAEVKKPGASVKVSCKASGYTFTTYWITWVRQAPGQGLEWMGDIYPGSSISNYAQKFQGRVTMTRDTSTSTVYMELSSLRSEDTAVYYCAREDGYDAWFAYWGQGTLVTVSS

SEQ ID NO: 13350 - protein, 468 aa, Artificial Sequence
  source: /note="Description of Artificial Sequence: Synthetic polypeptide"
MGWSCIILFLVATATGVHSQVQLVQSGAEVKKPGASVKVSCKASGYTFTTYWITWVRQAPGQGLEWMGDIYPGSSICNYAQKFQGRVTMTVDTSTSTVYMELSSLRSEDTAVYYCAREDGYDAWFAYWGQGTLVTVSSASTKGPSVFPLAPSSKSTSGGTAALGCLVKDYFPEPVTVSWNSGALTSGVHTFPAVLQSSGLYSLSSVVTVPSSSLGTQTYICNVNHKPSNTKVDKKVEPKSCDKTHTCPPCPAPELLGGPSVFLFPPKPKDTLMISRTPEVTCVVVDVSHEDPEVKFNWYVDGVEVHNAKTKPREEQYNSTYRVVSVLTVLHQDWLNGKEYKCKVSNKALPAPIEKTISKAKGQPREPQVYTLPPSRDELTKNQVSLTCLVKGFYPSDIAVEWESNGQPENNYKTTPPVLDSDGSFFLYSKLTVDKSRWQQGNVFSCSVMHEALHNHYTQKSLSLSPGK

SEQ ID NO: 13351 - protein, 449 aa, Artificial Sequence
  source: /note="Description of Artificial Sequence: Synthetic polypeptide"
QVQLVQSGAEVKKPGASVKVSCKASGYTFTTYWITWVRQAPGQGLEWMGDIYPGSSICNYAQKFQGRVTMTVDTSTSTVYMELSSLRSEDTAVYYCAREDGYDAWFAYWGQGTLVTVSSASTKGPSVFPLAPSSKSTSGGTAALGCLVKDYFPEPVTVSWNSGALTSGVHTFPAVLQSSGLYSLSSVVTVPSSSLGTQTYICNVNHKPSNTKVDKKVEPKSCDKTHTCPPCPAPELLGGPSVFLFPPKPKDTLMISRTPEVTCVVVDVSHEDPEVKFNWYVDGVEVHNAKTKPREEQYNSTYRVVSVLTVLHQDWLNGKEYKCKVSNKALPAPIEKTISKAKGQPREPQVYTLPPSRDELTKNQVSLTCLVKGFYPSDIAVEWESNGQPENNYKTTPPVLDSDGSFFLYSKLTVDKSRWQQGNVFSCSVMHEALHNHYTQKSLSLSPGK

SEQ ID NO: 13352 - protein, 119 aa, Artificial Sequence
  source: /note="Description of Artificial Sequence: Synthetic polypeptide"
QVQLVQSGAEVKKPGASVKVSCKASGYTFTTYWITWVRQAPGQGLEWMGDIYPGSSICNYAQKFQGRVTMTVDTSTSTVYMELSSLRSEDTAVYYCAREDGYDAWFAYWGQGTLVTVSS

SEQ ID NO: 13353 - protein, 468 aa, Artificial Sequence
  source: /note="Description of Artificial Sequence: Synthetic polypeptide"
MGWSCIILFLVATATGVHSQVQLVQSGAEVKKPGASVKVSCKASGYTFTTYWITWVRQAPGQGLEWMGDIYPGSSICNYAQKFQGRVTMTRDTSTSTVYMELSSLRSEDTAVYYCAREDGYDAWFAYWGQGTLVTVSSASTKGPSVFPLAPSSKSTSGGTAALGCLVKDYFPEPVTVSWNSGALTSGVHTFPAVLQSSGLYSLSSVVTVPSSSLGTQTYICNVNHKPSNTKVDKKVEPKSCDKTHTCPPCPAPELLGGPSVFLFPPKPKDTLMISRTPEVTCVVVDVSHEDPEVKFNWYVDGVEVHNAKTKPREEQYNSTYRVVSVLTVLHQDWLNGKEYKCKVSNKALPAPIEKTISKAKGQPREPQVYTLPPSRDELTKNQVSLTCLVKGFYPSDIAVEWESNGQPENNYKTTPPVLDSDGSFFLYSKLTVDKSRWQQGNVFSCSVMHEALHNHYTQKSLSLSPGK

SEQ ID NO: 13354 - protein, 449 aa, Artificial Sequence
  source: /note="Description of Artificial Sequence: Synthetic polypeptide"
QVQLVQSGAEVKKPGASVKVSCKASGYTFTTYWITWVRQAPGQGLEWMGDIYPGSSICNYAQKFQGRVTMTRDTSTSTVYMELSSLRSEDTAVYYCAREDGYDAWFAYWGQGTLVTVSSASTKGPSVFPLAPSSKSTSGGTAALGCLVKDYFPEPVTVSWNSGALTSGVHTFPAVLQSSGLYSLSSVVTVPSSSLGTQTYICNVNHKPSNTKVDKKVEPKSCDKTHTCPPCPAPELLGGPSVFLFPPKPKDTLMISRTPEVTCVVVDVSHEDPEVKFNWYVDGVEVHNAKTKPREEQYNSTYRVVSVLTVLHQDWLNGKEYKCKVSNKALPAPIEKTISKAKGQPREPQVYTLPPSRDELTKNQVSLTCLVKGFYPSDIAVEWESNGQPENNYKTTPPVLDSDGSFFLYSKLTVDKSRWQQGNVFSCSVMHEALHNHYTQKSLSLSPGK

SEQ ID NO: 13355 - protein, 119 aa, Artificial Sequence
  source: /note="Description of Artificial Sequence: Synthetic polypeptide"
QVQLVQSGAEVKKPGASVKVSCKASGYTFTTYWITWVRQAPGQGLEWMGDIYPGSSICNYAQKFQGRVTMTRDTSTSTVYMELSSLRSEDTAVYYCAREDGYDAWFAYWGQGTLVTVSS

SEQ ID NO: 13356 - protein, 468 aa, Artificial Sequence
  source: /note="Description of Artificial Sequence: Synthetic polypeptide"
MGWSCIILFLVATATGVHSEVQLLESGGGLVQPGGSLRLSCAASGYTFTTYWITWVRQAPGKGLEWVSDIYPGSSICNYNEKFKSRFTISRDNSKNTLYLQMNSLRAEDTAVYYCAKEDGYDAWFAYWGQGTLVTVSSASTKGPSVFPLAPSSKSTSGGTAALGCLVKDYFPEPVTVSWNSGALTSGVHTFPAVLQSSGLYSLSSVVTVPSSSLGTQTYICNVNHKPSNTKVDKKVEPKSCDKTHTCPPCPAPELLGGPSVFLFPPKPKDTLMISRTPEVTCVVVDVSHEDPEVKFNWYVDGVEVHNAKTKPREEQYNSTYRVVSVLTVLHQDWLNGKEYKCKVSNKALPAPIEKTISKAKGQPREPQVYTLPPSRDELTKNQVSLTCLVKGFYPSDIAVEWESNGQPENNYKTTPPVLDSDGSFFLYSKLTVDKSRWQQGNVFSCSVMHEALHNHYTQKSLSLSPGK

SEQ ID NO: 13357 - protein, 449 aa, Artificial Sequence
  source: /note="Description of Artificial Sequence: Synthetic polypeptide"
EVQLLESGGGLVQPGGSLRLSCAASGYTFTTYWITWVRQAPGKGLEWVSDIYPGSSICNYNEKFKSRFTISRDNSKNTLYLQMNSLRAEDTAVYYCAKEDGYDAWFAYWGQGTLVTVSSASTKGPSVFPLAPSSKSTSGGTAALGCLVKDYFPEPVTVSWNSGALTSGVHTFPAVLQSSGLYSLSSVVTVPSSSLGTQTYICNVNHKPSNTKVDKKVEPKSCDKTHTCPPCPAPELLGGPSVFLFPPKPKDTLMISRTPEVTCVVVDVSHEDPEVKFNWYVDGVEVHNAKTKPREEQYNSTYRVVSVLTVLHQDWLNGKEYKCKVSNKALPAPIEKTISKAKGQPREPQVYTLPPSRDELTKNQVSLTCLVKGFYPSDIAVEWESNGQPENNYKTTPPVLDSDGSFFLYSKLTVDKSRWQQGNVFSCSVMHEALHNHYTQKSLSLSPGK

SEQ ID NO: 13358 - protein, 119 aa, Artificial Sequence
  source: /note="Description of Artificial Sequence: Synthetic polypeptide"
EVQLLESGGGLVQPGGSLRLSCAASGYTFTTYWITWVRQAPGKGLEWVSDIYPGSSICNYNEKFKSRFTISRDNSKNTLYLQMNSLRAEDTAVYYCAKEDGYDAWFAYWGQGTLVTVSS

SEQ ID NO: 13359 - protein, 468 aa, Artificial Sequence
  source: /note="Description of Artificial Sequence: Synthetic polypeptide"
MGWSCIILFLVATATGVHSEVQLLESGGGLVQPGGSLRLSCAASGYTFTTYWITWVRQAPGKGLEWVGDIYPGSSICNYNEKFKSRFTISVDNSKSTAYLQMNSLRAEDTAVYYCAREDGYDAWFAYWGQGTLVTVSSASTKGPSVFPLAPSSKSTSGGTAALGCLVKDYFPEPVTVSWNSGALTSGVHTFPAVLQSSGLYSLSSVVTVPSSSLGTQTYICNVNHKPSNTKVDKKVEPKSCDKTHTCPPCPAPELLGGPSVFLFPPKPKDTLMISRTPEVTCVVVDVSHEDPEVKFNWYVDGVEVHNAKTKPREEQYNSTYRVVSVLTVLHQDWLNGKEYKCKVSNKALPAPIEKTISKAKGQPREPQVYTLPPSRDELTKNQVSLTCLVKGFYPSDIAVEWESNGQPENNYKTTPPVLDSDGSFFLYSKLTVDKSRWQQGNVFSCSVMHEALHNHYTQKSLSLSPGK

SEQ ID NO: 13360 - protein, 449 aa, Artificial Sequence
  source: /note="Description of Artificial Sequence: Synthetic polypeptide"
EVQLLESGGGLVQPGGSLRLSCAASGYTFTTYWITWVRQAPGKGLEWVGDIYPGSSICNYNEKFKSRFTISVDNSKSTAYLQMNSLRAEDTAVYYCAREDGYDAWFAYWGQGTLVTVSSASTKGPSVFPLAPSSKSTSGGTAALGCLVKDYFPEPVTVSWNSGALTSGVHTFPAVLQSSGLYSLSSVVTVPSSSLGTQTYICNVNHKPSNTKVDKKVEPKSCDKTHTCPPCPAPELLGGPSVFLFPPKPKDTLMISRTPEVTCVVVDVSHEDPEVKFNWYVDGVEVHNAKTKPREEQYNSTYRVVSVLTVLHQDWLNGKEYKCKVSNKALPAPIEKTISKAKGQPREPQVYTLPPSRDELTKNQVSLTCLVKGFYPSDIAVEWESNGQPENNYKTTPPVLDSDGSFFLYSKLTVDKSRWQQGNVFSCSVMHEALHNHYTQKSLSLSPGK

SEQ ID NO: 13361 - protein, 119 aa, Artificial Sequence
  source: /note="Description of Artificial Sequence: Synthetic polypeptide"
EVQLLESGGGLVQPGGSLRLSCAASGYTFTTYWITWVRQAPGKGLEWVGDIYPGSSICNYNEKFKSRFTISVDNSKSTAYLQMNSLRAEDTAVYYCAREDGYDAWFAYWGQGTLVTVSS

SEQ ID NO: 13362 - protein, 468 aa, Artificial Sequence
  source: /note="Description of Artificial Sequence: Synthetic polypeptide"
MGWSCIILFLVATATGVHSEVQLLESGGGLVQPGGSLRLSCAASGYTFTTYWITWVRQAPGKGLEWVGDIYPGSSICNYADSVKGRFTISVDNSKSTAYLQMNSLRAEDTAVYYCAREDGYDAWFAYWGQGTLVTVSSASTKGPSVFPLAPSSKSTSGGTAALGCLVKDYFPEPVTVSWNSGALTSGVHTFPAVLQSSGLYSLSSVVTVPSSSLGTQTYICNVNHKPSNTKVDKKVEPKSCDKTHTCPPCPAPELLGGPSVFLFPPKPKDTLMISRTPEVTCVVVDVSHEDPEVKFNWYVDGVEVHNAKTKPREEQYNSTYRVVSVLTVLHQDWLNGKEYKCKVSNKALPAPIEKTISKAKGQPREPQVYTLPPSRDELTKNQVSLTCLVKGFYPSDIAVEWESNGQPENNYKTTPPVLDSDGSFFLYSKLTVDKSRWQQGNVFSCSVMHEALHNHYTQKSLSLSPGK

SEQ ID NO: 13363 - protein, 449 aa, Artificial Sequence
  source: /note="Description of Artificial Sequence: Synthetic polypeptide"
EVQLLESGGGLVQPGGSLRLSCAASGYTFTTYWITWVRQAPGKGLEWVGDIYPGSSICNYADSVKGRFTISVDNSKSTAYLQMNSLRAEDTAVYYCAREDGYDAWFAYWGQGTLVTVSSASTKGPSVFPLAPSSKSTSGGTAALGCLVKDYFPEPVTVSWNSGALTSGVHTFPAVLQSSGLYSLSSVVTVPSSSLGTQTYICNVNHKPSNTKVDKKVEPKSCDKTHTCPPCPAPELLGGPSVFLFPPKPKDTLMISRTPEVTCVVVDVSHEDPEVKFNWYVDGVEVHNAKTKPREEQYNSTYRVVSVLTVLHQDWLNGKEYKCKVSNKALPAPIEKTISKAKGQPREPQVYTLPPSRDELTKNQVSLTCLVKGFYPSDIAVEWESNGQPENNYKTTPPVLDSDGSFFLYSKLTVDKSRWQQGNVFSCSVMHEALHNHYTQKSLSLSPGK

SEQ ID NO: 13364 - protein, 119 aa, Artificial Sequence
  source: /note="Description of Artificial Sequence: Synthetic polypeptide"
EVQLLESGGGLVQPGGSLRLSCAASGYTFTTYWITWVRQAPGKGLEWVGDIYPGSSICNYADSVKGRFTISVDNSKSTAYLQMNSLRAEDTAVYYCAREDGYDAWFAYWGQGTLVTVSS

SEQ ID NO: 13365 - protein, 468 aa, Artificial Sequence
  source: /note="Description of Artificial Sequence: Synthetic polypeptide"
MGWSCIILFLVATATGVHSEVQLLESGGGLVQPGGSLRLSCAASGYTFTTYWITWVRQAPGKGLEWVGDIYPGSSICNYADKFKGRFTISVDNSKSTAYLQMNSLRAEDTAVYYCAREDGYDAWFAYWGQGTLVTVSSASTKGPSVFPLAPSSKSTSGGTAALGCLVKDYFPEPVTVSWNSGALTSGVHTFPAVLQSSGLYSLSSVVTVPSSSLGTQTYICNVNHKPSNTKVDKKVEPKSCDKTHTCPPCPAPELLGGPSVFLFPPKPKDTLMISRTPEVTCVVVDVSHEDPEVKFNWYVDGVEVHNAKTKPREEQYNSTYRVVSVLTVLHQDWLNGKEYKCKVSNKALPAPIEKTISKAKGQPREPQVYTLPPSRDELTKNQVSLTCLVKGFYPSDIAVEWESNGQPENNYKTTPPVLDSDGSFFLYSKLTVDKSRWQQGNVFSCSVMHEALHNHYTQKSLSLSPGK

SEQ ID NO: 13366 - protein, 449 aa, Artificial Sequence
  source: /note="Description of Artificial Sequence: Synthetic polypeptide"
EVQLLESGGGLVQPGGSLRLSCAASGYTFTTYWITWVRQAPGKGLEWVGDIYPGSSICNYADKFKGRFTISVDNSKSTAYLQMNSLRAEDTAVYYCAREDGYDAWFAYWGQGTLVTVSSASTKGPSVFPLAPSSKSTSGGTAALGCLVKDYFPEPVTVSWNSGALTSGVHTFPAVLQSSGLYSLSSVVTVPSSSLGTQTYICNVNHKPSNTKVDKKVEPKSCDKTHTCPPCPAPELLGGPSVFLFPPKPKDTLMISRTPEVTCVVVDVSHEDPEVKFNWYVDGVEVHNAKTKPREEQYNSTYRVVSVLTVLHQDWLNGKEYKCKVSNKALPAPIEKTISKAKGQPREPQVYTLPPSRDELTKNQVSLTCLVKGFYPSDIAVEWESNGQPENNYKTTPPVLDSDGSFFLYSKLTVDKSRWQQGNVFSCSVMHEALHNHYTQKSLSLSPGK

SEQ ID NO: 13367 - protein, 468 aa, Artificial Sequence
  source: /note="Description of Artificial Sequence: Synthetic polypeptide"
MGWSCIILFLVATATGVHSEVQLLESGGGLVQPGGSLRLSCAASGYTFTTYWITWVRQAPGKGLEWVGDIYPGSSICNYNEKFKSRFTISVDNSKNTAYLQMNSLRAEDTAVYYCAREDGYDAWFAYWGQGTLVTVSSASTKGPSVFPLAPSSKSTSGGTAALGCLVKDYFPEPVTVSWNSGALTSGVHTFPAVLQSSGLYSLSSVVTVPSSSLGTQTYICNVNHKPSNTKVDKKVEPKSCDKTHTCPPCPAPELLGGPSVFLFPPKPKDTLMISRTPEVTCVVVDVSHEDPEVKFNWYVDGVEVHNAKTKPREEQYNSTYRVVSVLTVLHQDWLNGKEYKCKVSNKALPAPIEKTISKAKGQPREPQVYTLPPSRDELTKNQVSLTCLVKGFYPSDIAVEWESNGQPENNYKTTPPVLDSDGSFFLYSKLTVDKSRWQQGNVFSCSVMHEALHNHYTQKSLSLSPGK

SEQ ID NO: 13368 - protein, 449 aa, Artificial Sequence
  source: /note="Description of Artificial Sequence: Synthetic polypeptide"
EVQLLESGGGLVQPGGSLRLSCAASGYTFTTYWITWVRQAPGKGLEWVGDIYPGSSICNYNEKFKSRFTISVDNSKNTAYLQMNSLRAEDTAVYYCAREDGYDAWFAYWGQGTLVTVSSASTKGPSVFPLAPSSKSTSGGTAALGCLVKDYFPEPVTVSWNSGALTSGVHTFPAVLQSSGLYSLSSVVTVPSSSLGTQTYICNVNHKPSNTKVDKKVEPKSCDKTHTCPPCPAPELLGGPSVFLFPPKPKDTLMISRTPEVTCVVVDVSHEDPEVKFNWYVDGVEVHNAKTKPREEQYNSTYRVVSVLTVLHQDWLNGKEYKCKVSNKALPAPIEKTISKAKGQPREPQVYTLPPSRDELTKNQVSLTCLVKGFYPSDIAVEWESNGQPENNYKTTPPVLDSDGSFFLYSKLTVDKSRWQQGNVFSCSVMHEALHNHYTQKSLSLSPGK

SEQ ID NO: 13369 - protein, 119 aa, Artificial Sequence
  source: /note="Description of Artificial Sequence: Synthetic polypeptide"
EVQLLESGGGLVQPGGSLRLSCAASGYTFTTYWITWVRQAPGKGLEWVGDIYPGSSICNYNEKFKSRFTISVDNSKNTAYLQMNSLRAEDTAVYYCAREDGYDAWFAYWGQGTLVTVSS

SEQ ID NO: 13370 - protein, 468 aa, Artificial Sequence
  source: /note="Description of Artificial Sequence: Synthetic polypeptide"
MGWSCIILFLVATATGVHSEVQLLESGGGLVQPGGSLRLSCAASGYTFTTYWITWVRQAPGKGLEWVSDIYPGSSICNYNEKFKSRFTISVDNSKNTAYLQMNSLRAEDTAVYYCAREDGYDAWFAYWGQGTLVTVSSASTKGPSVFPLAPSSKSTSGGTAALGCLVKDYFPEPVTVSWNSGALTSGVHTFPAVLQSSGLYSLSSVVTVPSSSLGTQTYICNVNHKPSNTKVDKKVEPKSCDKTHTCPPCPAPELLGGPSVFLFPPKPKDTLMISRTPEVTCVVVDVSHEDPEVKFNWYVDGVEVHNAKTKPREEQYNSTYRVVSVLTVLHQDWLNGKEYKCKVSNKALPAPIEKTISKAKGQPREPQVYTLPPSRDELTKNQVSLTCLVKGFYPSDIAVEWESNGQPENNYKTTPPVLDSDGSFFLYSKLTVDKSRWQQGNVFSCSVMHEALHNHYTQKSLSLSPGK

SEQ ID NO: 13371 - protein, 449 aa, Artificial Sequence
  source: /note="Description of Artificial Sequence: Synthetic polypeptide"
EVQLLESGGGLVQPGGSLRLSCAASGYTFTTYWITWVRQAPGKGLEWVSDIYPGSSICNYNEKFKSRFTISVDNSKNTAYLQMNSLRAEDTAVYYCAREDGYDAWFAYWGQGTLVTVSSASTKGPSVFPLAPSSKSTSGGTAALGCLVKDYFPEPVTVSWNSGALTSGVHTFPAVLQSSGLYSLSSVVTVPSSSLGTQTYICNVNHKPSNTKVDKKVEPKSCDKTHTCPPCPAPELLGGPSVFLFPPKPKDTLMISRTPEVTCVVVDVSHEDPEVKFNWYVDGVEVHNAKTKPREEQYNSTYRVVSVLTVLHQDWLNGKEYKCKVSNKALPAPIEKTISKAKGQPREPQVYTLPPSRDELTKNQVSLTCLVKGFYPSDIAVEWESNGQPENNYKTTPPVLDSDGSFFLYSKLTVDKSRWQQGNVFSCSVMHEALHNHYTQKSLSLSPGK

SEQ ID NO: 13372 - protein, 119 aa, Artificial Sequence
  source: /note="Description of Artificial Sequence: Synthetic polypeptide"
EVQLLESGGGLVQPGGSLRLSCAASGYTFTTYWITWVRQAPGKGLEWVSDIYPGSSICNYNEKFKSRFTISVDNSKNTAYLQMNSLRAEDTAVYYCAREDGYDAWFAYWGQGTLVTVSS

SEQ ID NO: 13373 - protein, 468 aa, Artificial Sequence
  source: /note="Description of Artificial Sequence: Synthetic polypeptide"
MGWSCIILFLVATATGVHSEVQLLESGGGLVQPGGSLRLSCAASGYTFTTYWITWVRQAPGKGLEWVSDIYPGSSICNYNEKFKSRFTISVDNSKNTLYLQMNSLRAEDTAVYYCAREDGYDAWFAYWGQGTLVTVSSASTKGPSVFPLAPSSKSTSGGTAALGCLVKDYFPEPVTVSWNSGALTSGVHTFPAVLQSSGLYSLSSVVTVPSSSLGTQTYICNVNHKPSNTKVDKKVEPKSCDKTHTCPPCPAPELLGGPSVFLFPPKPKDTLMISRTPEVTCVVVDVSHEDPEVKFNWYVDGVEVHNAKTKPREEQYNSTYRVVSVLTVLHQDWLNGKEYKCKVSNKALPAPIEKTISKAKGQPREPQVYTLPPSRDELTKNQVSLTCLVKGFYPSDIAVEWESNGQPENNYKTTPPVLDSDGSFFLYSKLTVDKSRWQQGNVFSCSVMHEALHNHYTQKSLSLSPGK

SEQ ID NO: 13374 - protein, 449 aa, Artificial Sequence
  source: /note="Description of Artificial Sequence: Synthetic polypeptide"
EVQLLESGGGLVQPGGSLRLSCAASGYTFTTYWITWVRQAPGKGLEWVSDIYPGSSICNYNEKFKSRFTISVDNSKNTLYLQMNSLRAEDTAVYYCAREDGYDAWFAYWGQGTLVTVSSASTKGPSVFPLAPSSKSTSGGTAALGCLVKDYFPEPVTVSWNSGALTSGVHTFPAVLQSSGLYSLSSVVTVPSSSLGTQTYICNVNHKPSNTKVDKKVEPKSCDKTHTCPPCPAPELLGGPSVFLFPPKPKDTLMISRTPEVTCVVVDVSHEDPEVKFNWYVDGVEVHNAKTKPREEQYNSTYRVVSVLTVLHQDWLNGKEYKCKVSNKALPAPIEKTISKAKGQPREPQVYTLPPSRDELTKNQVSLTCLVKGFYPSDIAVEWESNGQPENNYKTTPPVLDSDGSFFLYSKLTVDKSRWQQGNVFSCSVMHEALHNHYTQKSLSLSPGK

SEQ ID NO: 13375 - protein, 119 aa, Artificial Sequence
  source: /note="Description of Artificial Sequence: Synthetic polypeptide"
EVQLLESGGGLVQPGGSLRLSCAASGYTFTTYWITWVRQAPGKGLEWVSDIYPGSSICNYNEKFKSRFTISVDNSKNTLYLQMNSLRAEDTAVYYCAREDGYDAWFAYWGQGTLVTVSS

SEQ ID NO: 13376 - protein, 468 aa, Artificial Sequence
  source: /note="Description of Artificial Sequence: Synthetic polypeptide"
MGWSCIILFLVATATGVHSEVQLLESGGGLVQPGGSLRLSCAASGYTFTTYWITWVRQAPGKGLEWVSDIYPGSSICNYNEKFKSRFTISRDNSKNTLYLQMNSLRAEDTAVYYCAREDGYDAWFAYWGQGTLVTVSSASTKGPSVFPLAPSSKSTSGGTAALGCLVKDYFPEPVTVSWNSGALTSGVHTFPAVLQSSGLYSLSSVVTVPSSSLGTQTYICNVNHKPSNTKVDKKVEPKSCDKTHTCPPCPAPELLGGPSVFLFPPKPKDTLMISRTPEVTCVVVDVSHEDPEVKFNWYVDGVEVHNAKTKPREEQYNSTYRVVSVLTVLHQDWLNGKEYKCKVSNKALPAPIEKTISKAKGQPREPQVYTLPPSRDELTKNQVSLTCLVKGFYPSDIAVEWESNGQPENNYKTTPPVLDSDGSFFLYSKLTVDKSRWQQGNVFSCSVMHEALHNHYTQKSLSLSPGK

SEQ ID NO: 13377 - protein, 449 aa, Artificial Sequence
  source: /note="Description of Artificial Sequence: Synthetic polypeptide"
EVQLLESGGGLVQPGGSLRLSCAASGYTFTTYWITWVRQAPGKGLEWVSDIYPGSSICNYNEKFKSRFTISRDNSKNTLYLQMNSLRAEDTAVYYCAREDGYDAWFAYWGQGTLVTVSSASTKGPSVFPLAPSSKSTSGGTAALGCLVKDYFPEPVTVSWNSGALTSGVHTFPAVLQSSGLYSLSSVVTVPSSSLGTQTYICNVNHKPSNTKVDKKVEPKSCDKTHTCPPCPAPELLGGPSVFLFPPKPKDTLMISRTPEVTCVVVDVSHEDPEVKFNWYVDGVEVHNAKTKPREEQYNSTYRVVSVLTVLHQDWLNGKEYKCKVSNKALPAPIEKTISKAKGQPREPQVYTLPPSRDELTKNQVSLTCLVKGFYPSDIAVEWESNGQPENNYKTTPPVLDSDGSFFLYSKLTVDKSRWQQGNVFSCSVMHEALHNHYTQKSLSLSPGK

SEQ ID NO: 13378 - protein, 119 aa, Artificial Sequence
  source: /note="Description of Artificial Sequence: Synthetic polypeptide"
EVQLLESGGGLVQPGGSLRLSCAASGYTFTTYWITWVRQAPGKGLEWVSDIYPGSSICNYNEKFKSRFTISRDNSKNTLYLQMNSLRAEDTAVYYCAREDGYDAWFAYWGQGTLVTVSS

SEQ ID NO: 13379 - protein, 468 aa, Artificial Sequence
  source: /note="Description of Artificial Sequence: Synthetic polypeptide"
MGWSCIILFLVATATGVHSEVQLLESGGGLVQPGGSLRLSCAASGYTFTTYWITWVRQAPGKGLEWVSDIYPGSSICNYADKFKGRFTISRDNSKNTLYLQMNSLRAEDTAVYYCAREDGYDAWFAYWGQGTLVTVSSASTKGPSVFPLAPSSKSTSGGTAALGCLVKDYFPEPVTVSWNSGALTSGVHTFPAVLQSSGLYSLSSVVTVPSSSLGTQTYICNVNHKPSNTKVDKKVEPKSCDKTHTCPPCPAPELLGGPSVFLFPPKPKDTLMISRTPEVTCVVVDVSHEDPEVKFNWYVDGVEVHNAKTKPREEQYNSTYRVVSVLTVLHQDWLNGKEYKCKVSNKALPAPIEKTISKAKGQPREPQVYTLPPSRDELTKNQVSLTCLVKGFYPSDIAVEWESNGQPENNYKTTPPVLDSDGSFFLYSKLTVDKSRWQQGNVFSCSVMHEALHNHYTQKSLSLSPGK

SEQ ID NO: 13380 - protein, 449 aa, Artificial Sequence
  source: /note="Description of Artificial Sequence: Synthetic polypeptide"
EVQLLESGGGLVQPGGSLRLSCAASGYTFTTYWITWVRQAPGKGLEWVSDIYPGSSICNYADKFKGRFTISRDNSKNTLYLQMNSLRAEDTAVYYCAREDGYDAWFAYWGQGTLVTVSSASTKGPSVFPLAPSSKSTSGGTAALGCLVKDYFPEPVTVSWNSGALTSGVHTFPAVLQSSGLYSLSSVVTVPSSSLGTQTYICNVNHKPSNTKVDKKVEPKSCDKTHTCPPCPAPELLGGPSVFLFPPKPKDTLMISRTPEVTCVVVDVSHEDPEVKFNWYVDGVEVHNAKTKPREEQYNSTYRVVSVLTVLHQDWLNGKEYKCKVSNKALPAPIEKTISKAKGQPREPQVYTLPPSRDELTKNQVSLTCLVKGFYPSDIAVEWESNGQPENNYKTTPPVLDSDGSFFLYSKLTVDKSRWQQGNVFSCSVMHEALHNHYTQKSLSLSPGK

SEQ ID NO: 13381 - protein, 119 aa, Artificial Sequence
  source: /note="Description of Artificial Sequence: Synthetic polypeptide"
EVQLLESGGGLVQPGGSLRLSCAASGYTFTTYWITWVRQAPGKGLEWVSDIYPGSSICNYADKFKGRFTISRDNSKNTLYLQMNSLRAEDTAVYYCAREDGYDAWFAYWGQGTLVTVSS

SEQ ID NO: 13382 - protein, 468 aa, Artificial Sequence
  source: /note="Description of Artificial Sequence: Synthetic polypeptide"
MGWSCIILFLVATATGVHSEVQLLESGGGLVQPGGSLRLSCAASGYTFTTYWITWVRQAPGKGLEWVSDIYPGSSICNYADKFKGRFTISRDNSKNTLYLQMNSLRAEDTAVYYCAKEDGYDAWFAYWGQGTLVTVSSASTKGPSVFPLAPSSKSTSGGTAALGCLVKDYFPEPVTVSWNSGALTSGVHTFPAVLQSSGLYSLSSVVTVPSSSLGTQTYICNVNHKPSNTKVDKKVEPKSCDKTHTCPPCPAPELLGGPSVFLFPPKPKDTLMISRTPEVTCVVVDVSHEDPEVKFNWYVDGVEVHNAKTKPREEQYNSTYRVVSVLTVLHQDWLNGKEYKCKVSNKALPAPIEKTISKAKGQPREPQVYTLPPSRDELTKNQVSLTCLVKGFYPSDIAVEWESNGQPENNYKTTPPVLDSDGSFFLYSKLTVDKSRWQQGNVFSCSVMHEALHNHYTQKSLSLSPGK

SEQ ID NO: 13383 - protein, 449 aa, Artificial Sequence
  source: /note="Description of Artificial Sequence: Synthetic polypeptide"
EVQLLESGGGLVQPGGSLRLSCAASGYTFTTYWITWVRQAPGKGLEWVSDIYPGSSICNYADKFKGRFTISRDNSKNTLYLQMNSLRAEDTAVYYCAKEDGYDAWFAYWGQGTLVTVSSASTKGPSVFPLAPSSKSTSGGTAALGCLVKDYFPEPVTVSWNSGALTSGVHTFPAVLQSSGLYSLSSVVTVPSSSLGTQTYICNVNHKPSNTKVDKKVEPKSCDKTHTCPPCPAPELLGGPSVFLFPPKPKDTLMISRTPEVTCVVVDVSHEDPEVKFNWYVDGVEVHNAKTKPREEQYNSTYRVVSVLTVLHQDWLNGKEYKCKVSNKALPAPIEKTISKAKGQPREPQVYTLPPSRDELTKNQVSLTCLVKGFYPSDIAVEWESNGQPENNYKTTPPVLDSDGSFFLYSKLTVDKSRWQQGNVFSCSVMHEALHNHYTQKSLSLSPGK

SEQ ID NO: 13384 - protein, 119 aa, Artificial Sequence
  source: /note="Description of Artificial Sequence: Synthetic polypeptide"
EVQLLESGGGLVQPGGSLRLSCAASGYTFTTYWITWVRQAPGKGLEWVSDIYPGSSICNYADKFKGRFTISRDNSKNTLYLQMNSLRAEDTAVYYCAKEDGYDAWFAYWGQGTLVTVSS

SEQ ID NO: 13385 - protein, 468 aa, Artificial Sequence
  source: /note="Description of Artificial Sequence: Synthetic polypeptide"
MGWSCIILFLVATATGVHSEVQLLESGGGLVQPGGSLRLSCAASGYTFTTYWITWVRQAPGKGLEWVSDIYPGSSISNYADSVKGRFTISRDNSKNTLYLQMNSLRAEDTAVYYCAREDGYDAWFAYWGQGTLVTVSSASTKGPSVFPLAPSSKSTSGGTAALGCLVKDYFPEPVTVSWNSGALTSGVHTFPAVLQSSGLYSLSSVVTVPSSSLGTQTYICNVNHKPSNTKVDKKVEPKSCDKTHTCPPCPAPELLGGPSVFLFPPKPKDTLMISRTPEVTCVVVDVSHEDPEVKFNWYVDGVEVHNAKTKPREEQYNSTYRVVSVLTVLHQDWLNGKEYKCKVSNKALPAPIEKTISKAKGQPREPQVYTLPPSRDELTKNQVSLTCLVKGFYPSDIAVEWESNGQPENNYKTTPPVLDSDGSFFLYSKLTVDKSRWQQGNVFSCSVMHEALHNHYTQKSLSLSPGK

SEQ ID NO: 13386 - protein, 449 aa, Artificial Sequence
  source: /note="Description of Artificial Sequence: Synthetic polypeptide"
EVQLLESGGGLVQPGGSLRLSCAASGYTFTTYWITWVRQAPGKGLEWVSDIYPGSSISNYADSVKGRFTISRDNSKNTLYLQMNSLRAEDTAVYYCAREDGYDAWFAYWGQGTLVTVSSASTKGPSVFPLAPSSKSTSGGTAALGCLVKDYFPEPVTVSWNSGALTSGVHTFPAVLQSSGLYSLSSVVTVPSSSLGTQTYICNVNHKPSNTKVDKKVEPKSCDKTHTCPPCPAPELLGGPSVFLFPPKPKDTLMISRTPEVTCVVVDVSHEDPEVKFNWYVDGVEVHNAKTKPREEQYNSTYRVVSVLTVLHQDWLNGKEYKCKVSNKALPAPIEKTISKAKGQPREPQVYTLPPSRDELTKNQVSLTCLVKGFYPSDIAVEWESNGQPENNYKTTPPVLDSDGSFFLYSKLTVDKSRWQQGNVFSCSVMHEALHNHYTQKSLSLSPGK

SEQ ID NO: 13387 - protein, 119 aa, Artificial Sequence
  source: /note="Description of Artificial Sequence: Synthetic polypeptide"
EVQLLESGGGLVQPGGSLRLSCAASGYTFTTYWITWVRQAPGKGLEWVSDIYPGSSISNYADSVKGRFTISRDNSKNTLYLQMNSLRAEDTAVYYCAREDGYDAWFAYWGQGTLVTVSS

SEQ ID NO: 13388 - protein, 468 aa, Artificial Sequence
  source: /note="Description of Artificial Sequence: Synthetic polypeptide"
MGWSCIILFLVATATGVHSEVQLLESGGGLVQPGGSLRLSCAASGYTFTTYWITWVRQAPGKGLEWVSDIYPGSSISNYNEKFKSRFTISRDNSKNTLYLQMNSLRAEDTAVYYCAREDGYDAWFAYWGQGTLVTVSSASTKGPSVFPLAPSSKSTSGGTAALGCLVKDYFPEPVTVSWNSGALTSGVHTFPAVLQSSGLYSLSSVVTVPSSSLGTQTYICNVNHKPSNTKVDKKVEPKSCDKTHTCPPCPAPELLGGPSVFLFPPKPKDTLMISRTPEVTCVVVDVSHEDPEVKFNWYVDGVEVHNAKTKPREEQYNSTYRVVSVLTVLHQDWLNGKEYKCKVSNKALPAPIEKTISKAKGQPREPQVYTLPPSRDELTKNQVSLTCLVKGFYPSDIAVEWESNGQPENNYKTTPPVLDSDGSFFLYSKLTVDKSRWQQGNVFSCSVMHEALHNHYTQKSLSLSPGK

SEQ ID NO: 13389 - protein, 449 aa, Artificial Sequence
  source: /note="Description of Artificial Sequence: Synthetic polypeptide"
EVQLLESGGGLVQPGGSLRLSCAASGYTFTTYWITWVRQAPGKGLEWVSDIYPGSSISNYNEKFKSRFTISRDNSKNTLYLQMNSLRAEDTAVYYCAREDGYDAWFAYWGQGTLVTVSSASTKGPSVFPLAPSSKSTSGGTAALGCLVKDYFPEPVTVSWNSGALTSGVHTFPAVLQSSGLYSLSSVVTVPSSSLGTQTYICNVNHKPSNTKVDKKVEPKSCDKTHTCPPCPAPELLGGPSVFLFPPKPKDTLMISRTPEVTCVVVDVSHEDPEVKFNWYVDGVEVHNAKTKPREEQYNSTYRVVSVLTVLHQDWLNGKEYKCKVSNKALPAPIEKTISKAKGQPREPQVYTLPPSRDELTKNQVSLTCLVKGFYPSDIAVEWESNGQPENNYKTTPPVLDSDGSFFLYSKLTVDKSRWQQGNVFSCSVMHEALHNHYTQKSLSLSPGK

SEQ ID NO: 13390 - protein, 119 aa, Artificial Sequence
  source: /note="Description of Artificial Sequence: Synthetic polypeptide"
EVQLLESGGGLVQPGGSLRLSCAASGYTFTTYWITWVRQAPGKGLEWVSDIYPGSSISNYNEKFKSRFTISRDNSKNTLYLQMNSLRAEDTAVYYCAREDGYDAWFAYWGQGTLVTVSS

SEQ ID NO: 13391 - protein, 468 aa, Artificial Sequence
  source: /note="Description of Artificial Sequence: Synthetic polypeptide"
MGWSCIILFLVATATGVHSEVQLLESGGGLVQPGGSLRLSCAASGYTFTTYWITWVRQAPGKGLEWVSDIYPGSSISNYNEKFKSRFTISVDNSKNTLYLQMNSLRAEDTAVYYCAREDGYDAWFAYWGQGTLVTVSSASTKGPSVFPLAPSSKSTSGGTAALGCLVKDYFPEPVTVSWNSGALTSGVHTFPAVLQSSGLYSLSSVVTVPSSSLGTQTYICNVNHKPSNTKVDKKVEPKSCDKTHTCPPCPAPELLGGPSVFLFPPKPKDTLMISRTPEVTCVVVDVSHEDPEVKFNWYVDGVEVHNAKTKPREEQYNSTYRVVSVLTVLHQDWLNGKEYKCKVSNKALPAPIEKTISKAKGQPREPQVYTLPPSRDELTKNQVSLTCLVKGFYPSDIAVEWESNGQPENNYKTTPPVLDSDGSFFLYSKLTVDKSRWQQGNVFSCSVMHEALHNHYTQKSLSLSPGK

SEQ ID NO: 13392 - protein, 449 aa, Artificial Sequence
  source: /note="Description of Artificial Sequence: Synthetic polypeptide"
EVQLLESGGGLVQPGGSLRLSCAASGYTFTTYWITWVRQAPGKGLEWVSDIYPGSSISNYNEKFKSRFTISVDNSKNTLYLQMNSLRAEDTAVYYCAREDGYDAWFAYWGQGTLVTVSSASTKGPSVFPLAPSSKSTSGGTAALGCLVKDYFPEPVTVSWNSGALTSGVHTFPAVLQSSGLYSLSSVVTVPSSSLGTQTYICNVNHKPSNTKVDKKVEPKSCDKTHTCPPCPAPELLGGPSVFLFPPKPKDTLMISRTPEVTCVVVDVSHEDPEVKFNWYVDGVEVHNAKTKPREEQYNSTYRVVSVLTVLHQDWLNGKEYKCKVSNKALPAPIEKTISKAKGQPREPQVYTLPPSRDELTKNQVSLTCLVKGFYPSDIAVEWESNGQPENNYKTTPPVLDSDGSFFLYSKLTVDKSRWQQGNVFSCSVMHEALHNHYTQKSLSLSPGK

SEQ ID NO: 13393 - protein, 119 aa, Artificial Sequence
  source: /note="Description of Artificial Sequence: Synthetic polypeptide"
EVQLLESGGGLVQPGGSLRLSCAASGYTFTTYWITWVRQAPGKGLEWVSDIYPGSSISNYNEKFKSRFTISVDNSKNTLYLQMNSLRAEDTAVYYCAREDGYDAWFAYWGQGTLVTVSS

SEQ ID NO: 13394 - protein, 145 aa, Artificial Sequence
  source: /note="Description of Artificial Sequence: Synthetic polypeptide"
MKLPVRLLVMMFWIPASSSDVLMTQTPLSLPVSLGDQASISCRSSQSILHSNGNTYLEWYLQKPGQSPKLLICKVSNRFSGVPDRFSGSGSGTDFTLKISRVEAEDLGVYYCFQGSHVPFTFGSGTKLEIKRADAAPTVSIFPPS

SEQ ID NO: 13395 - protein, 126 aa, Artificial Sequence
  source: /note="Description of Artificial Sequence: Synthetic polypeptide"
DVLMTQTPLSLPVSLGDQASISCRSSQSILHSNGNTYLEWYLQKPGQSPKLLICKVSNRFSGVPDRFSGSGSGTDFTLKISRVEAEDLGVYYCFQGSHVPFTFGSGTKLEIKRADAAPTVSIFPPS

SEQ ID NO: 13396 - protein, 112 aa, Artificial Sequence
  source: /note="Description of Artificial Sequence: Synthetic polypeptide"
DVLMTQTPLSLPVSLGDQASISCRSSQSILHSNGNTYLEWYLQKPGQSPKLLICKVSNRFSGVPDRFSGSGSGTDFTLKISRVEAEDLGVYYCFQGSHVPFTFGSGTKLEIK

SEQ ID NO: 13397 - protein, 238 aa, Artificial Sequence
  source: /note="Description of Artificial Sequence: Synthetic polypeptide"
MGWSCIILFLVATATGVHSDVVMTQSPLSLPVTLGQPASISCRSSQSILHSNGNTYLEWFQQRPGQSPRRLIYKVSNRFSGVPDRFSGSGSGTDFTLKISRVEAEDVGVYYCFQGSHVPFTFGQGTKLEIKRTVAAPSVFIFPPSDEQLKSGTASVVCLLNNFYPREAKVQWKVDNALQSGNSQESVTEQDSKDSTYSLSSTLTLSKADYEKHKVYACEVTHQGLSSPVTKSFNRGEC

SEQ ID NO: 13398 - protein, 219 aa, Artificial Sequence
  source: /note="Description of Artificial Sequence: Synthetic polypeptide"
DVVMTQSPLSLPVTLGQPASISCRSSQSILHSNGNTYLEWFQQRPGQSPRRLIYKVSNRFSGVPDRFSGSGSGTDFTLKISRVEAEDVGVYYCFQGSHVPFTFGQGTKLEIKRTVAAPSVFIFPPSDEQLKSGTASVVCLLNNFYPREAKVQWKVDNALQSGNSQESVTEQDSKDSTYSLSSTLTLSKADYEKHKVYACEVTHQGLSSPVTKSFNRGEC

SEQ ID NO: 13399 - protein, 112 aa, Artificial Sequence
  source: /note="Description of Artificial Sequence: Synthetic polypeptide"
DVVMTQSPLSLPVTLGQPASISCRSSQSILHSNGNTYLEWFQQRPGQSPRRLIYKVSNRFSGVPDRFSGSGSGTDFTLKISRVEAEDVGVYYCFQGSHVPFTFGQGTKLEIK

SEQ ID NO: 13400 - protein, 238 aa, Artificial Sequence
  source: /note="Description of Artificial Sequence: Synthetic polypeptide"
MGWSCIILFLVATATGVHSDVVMTQSPLSLPVTLGQPASISCRSSQSILHSNGNTYLEWYQQRPGQSPRLLICKVSNRFSGVPDRFSGSGSGTDFTLKISRVEAEDVGVYYCFQGSHVPFTFGQGTKLEIKRTVAAPSVFIFPPSDEQLKSGTASVVCLLNNFYPREAKVQWKVDNALQSGNSQESVTEQDSKDSTYSLSSTLTLSKADYEKHKVYACEVTHQGLSSPVTKSFNRGEC

SEQ ID NO: 13401 - protein, 219 aa, Artificial Sequence
  source: /note="Description of Artificial Sequence: Synthetic polypeptide"
DVVMTQSPLSLPVTLGQPASISCRSSQSILHSNGNTYLEWYQQRPGQSPRLLICKVSNRFSGVPDRFSGSGSGTDFTLKISRVEAEDVGVYYCFQGSHVPFTFGQGTKLEIKRTVAAPSVFIFPPSDEQLKSGTASVVCLLNNFYPREAKVQWKVDNALQSGNSQESVTEQDSKDSTYSLSSTLTLSKADYEKHKVYACEVTHQGLSSPVTKSFNRGEC

SEQ ID NO: 13402 - protein, 112 aa, Artificial Sequence
  source: /note="Description of Artificial Sequence: Synthetic polypeptide"
DVVMTQSPLSLPVTLGQPASISCRSSQSILHSNGNTYLEWYQQRPGQSPRLLICKVSNRFSGVPDRFSGSGSGTDFTLKISRVEAEDVGVYYCFQGSHVPFTFGQGTKLEIK

SEQ ID NO: 13403 - protein, 238 aa, Artificial Sequence
  source: /note="Description of Artificial Sequence: Synthetic polypeptide"
MGWSCIILFLVATATGVHSDVVMTQSPLSLPVTLGQPASISCRSSQSILHSNGNTYLEWFQQRPGQSPRRLICKVSNRFSGVPDRFSGSGSGTDFTLKISRVEAEDVGVYYCFQGSHVPFTFGQGTKLEIKRTVAAPSVFIFPPSDEQLKSGTASVVCLLNNFYPREAKVQWKVDNALQSGNSQESVTEQDSKDSTYSLSSTLTLSKADYEKHKVYACEVTHQGLSSPVTKSFNRGEC

SEQ ID NO: 13404 - protein, 219 aa, Artificial Sequence
  source: /note="Description of Artificial Sequence: Synthetic polypeptide"
DVVMTQSPLSLPVTLGQPASISCRSSQSILHSNGNTYLEWFQQRPGQSPRRLICKVSNRFSGVPDRFSGSGSGTDFTLKISRVEAEDVGVYYCFQGSHVPFTFGQGTKLEIKRTVAAPSVFIFPPSDEQLKSGTASVVCLLNNFYPREAKVQWKVDNALQSGNSQESVTEQDSKDSTYSLSSTLTLSKADYEKHKVYACEVTHQGLSSPVTKSFNRGEC

SEQ ID NO: 13405 - protein, 112 aa, Artificial Sequence
  source: /note="Description of Artificial Sequence: Synthetic polypeptide"
DVVMTQSPLSLPVTLGQPASISCRSSQSILHSNGNTYLEWFQQRPGQSPRRLICKVSNRFSGVPDRFSGSGSGTDFTLKISRVEAEDVGVYYCFQGSHVPFTFGQGTKLEIK

SEQ ID NO: 13406 - protein, 238 aa, Artificial Sequence
  source: /note="Description of Artificial Sequence: Synthetic polypeptide"
MGWSCIILFLVATATGVHSDVVMTQSPLSLPVTLGQPASISCRSSQSILHSNGNTYLEWYQQRPGQSPRRLICKVSNRFSGVPDRFSGSGSGTDFTLKISRVEAEDVGVYYCFQGSHVPFTFGQGTKLEIKRTVAAPSVFIFPPSDEQLKSGTASVVCLLNNFYPREAKVQWKVDNALQSGNSQESVTEQDSKDSTYSLSSTLTLSKADYEKHKVYACEVTHQGLSSPVTKSFNRGEC

SEQ ID NO: 13407 - protein, 219 aa, Artificial Sequence
  source: /note="Description of Artificial Sequence: Synthetic polypeptide"
DVVMTQSPLSLPVTLGQPASISCRSSQSILHSNGNTYLEWYQQRPGQSPRRLICKVSNRFSGVPDRFSGSGSGTDFTLKISRVEAEDVGVYYCFQGSHVPFTFGQGTKLEIKRTVAAPSVFIFPPSDEQLKSGTASVVCLLNNFYPREAKVQWKVDNALQSGNSQESVTEQDSKDSTYSLSSTLTLSKADYEKHKVYACEVTHQGLSSPVTKSFNRGEC

SEQ ID NO: 13408 - protein, 112 aa, Artificial Sequence
  source: /note="Description of Artificial Sequence: Synthetic polypeptide"
DVVMTQSPLSLPVTLGQPASISCRSSQSILHSNGNTYLEWYQQRPGQSPRRLICKVSNRFSGVPDRFSGSGSGTDFTLKISRVEAEDVGVYYCFQGSHVPFTFGQGTKLEIK

SEQ ID NO: 13409 - protein, 238 aa, Artificial Sequence
  source: /note="Description of Artificial Sequence: Synthetic polypeptide"
MGWSCIILFLVATATGVHSDVVMTQSPLSLPVTLGQPASISCRSSQSILHSNGNTYLEWFQQRPGQSPRLLICKVSNRFSGVPDRFSGSGSGTDFTLKISRVEAEDVGVYYCFQGSHVPFTFGQGTKLEIKRTVAAPSVFIFPPSDEQLKSGTASVVCLLNNFYPREAKVQWKVDNALQSGNSQESVTEQDSKDSTYSLSSTLTLSKADYEKHKVYACEVTHQGLSSPVTKSFNRGEC

SEQ ID NO: 13410 - protein, 219 aa, Artificial Sequence
  source: /note="Description of Artificial Sequence: Synthetic polypeptide"
DVVMTQSPLSLPVTLGQPASISCRSSQSILHSNGNTYLEWFQQRPGQSPRLLICKVSNRFSGVPDRFSGSGSGTDFTLKISRVEAEDVGVYYCFQGSHVPFTFGQGTKLEIKRTVAAPSVFIFPPSDEQLKSGTASVVCLLNNFYPREAKVQWKVDNALQSGNSQESVTEQDSKDSTYSLSSTLTLSKADYEKHKVYACEVTHQGLSSPVTKSFNRGEC

SEQ ID NO: 13411 - protein, 112 aa, Artificial Sequence
  source: /note="Description of Artificial Sequence: Synthetic polypeptide"
DVVMTQSPLSLPVTLGQPASISCRSSQSILHSNGNTYLEWFQQRPGQSPRLLICKVSNRFSGVPDRFSGSGSGTDFTLKISRVEAEDVGVYYCFQGSHVPFTFGQGTKLEIK

SEQ ID NO: 13412 - protein, 238 aa, Artificial Sequence
  source: /note="Description of Artificial Sequence: Synthetic polypeptide"
MGWSCIILFLVATATGVHSDVVMTQSPLSLPVTLGQPASISCRSSQSILHSNGNTYLEWYQQRPGQSPRLLISKVSNRFSGVPDRFSGSGSGTDFTLKISRVEAEDVGVYYCFQGSHVPFTFGQGTKLEIKRTVAAPSVFIFPPSDEQLKSGTASVVCLLNNFYPREAKVQWKVDNALQSGNSQESVTEQDSKDSTYSLSSTLTLSKADYEKHKVYACEVTHQGLSSPVTKSFNRGEC

SEQ ID NO: 13413 - protein, 219 aa, Artificial Sequence
  source: /note="Description of Artificial Sequence: Synthetic polypeptide"
DVVMTQSPLSLPVTLGQPASISCRSSQSILHSNGNTYLEWYQQRPGQSPRLLISKVSNRFSGVPDRFSGSGSGTDFTLKISRVEAEDVGVYYCFQGSHVPFTFGQGTKLEIKRTVAAPSVFIFPPSDEQLKSGTASVVCLLNNFYPREAKVQWKVDNALQSGNSQESVTEQDSKDSTYSLSSTLTLSKADYEKHKVYACEVTHQGLSSPVTKSFNRGEC

SEQ ID NO: 13414 - protein, 112 aa, Artificial Sequence
  source: /note="Description of Artificial Sequence: Synthetic polypeptide"
DVVMTQSPLSLPVTLGQPASISCRSSQSILHSNGNTYLEWYQQRPGQSPRLLISKVSNRFSGVPDRFSGSGSGTDFTLKISRVEAEDVGVYYCFQGSHVPFTFGQGTKLEIK

SEQ ID NO: 13415 - protein, 238 aa, Artificial Sequence
  source: /note="Description of Artificial Sequence: Synthetic polypeptide"
MGWSCIILFLVATATGVHSDVVMTQSPLSLPVTLGQPASISCRSSQSILHSNGNTYLEWFQQRPGQSPRRLISKVSNRFSGVPDRFSGSGSGTDFTLKISRVEAEDVGVYYCFQGSHVPFTFGQGTKLEIKRTVAAPSVFIFPPSDEQLKSGTASVVCLLNNFYPREAKVQWKVDNALQSGNSQESVTEQDSKDSTYSLSSTLTLSKADYEKHKVYACEVTHQGLSSPVTKSFNRGEC

SEQ ID NO: 13416 - protein, 219 aa, Artificial Sequence
  source: /note="Description of Artificial Sequence: Synthetic polypeptide"
DVVMTQSPLSLPVTLGQPASISCRSSQSILHSNGNTYLEWFQQRPGQSPRRLISKVSNRFSGVPDRFSGSGSGTDFTLKISRVEAEDVGVYYCFQGSHVPFTFGQGTKLEIKRTVAAPSVFIFPPSDEQLKSGTASVVCLLNNFYPREAKVQWKVDNALQSGNSQESVTEQDSKDSTYSLSSTLTLSKADYEKHKVYACEVTHQGLSSPVTKSFNRGEC

SEQ ID NO: 13417 - protein, 112 aa, Artificial Sequence
  source: /note="Description of Artificial Sequence: Synthetic polypeptide"
DVVMTQSPLSLPVTLGQPASISCRSSQSILHSNGNTYLEWFQQRPGQSPRRLISKVSNRFSGVPDRFSGSGSGTDFTLKISRVEAEDVGVYYCFQGSHVPFTFGQGTKLEIK

SEQ ID NO: 13418 - protein, 238 aa, Artificial Sequence
  source: /note="Description of Artificial Sequence: Synthetic polypeptide"
MGWSCIILFLVATATGVHSDVVMTQSPLSLPVTLGQPASISCRSSQSIVHSNGNTYLEWFQQRPGQSPRRLISKVSNRFSGVPDRFSGSGSGTDFTLKISRVEAEDVGVYYCFQGSHVPFTFGQGTKLEIKRTVAAPSVFIFPPSDEQLKSGTASVVCLLNNFYPREAKVQWKVDNALQSGNSQESVTEQDSKDSTYSLSSTLTLSKADYEKHKVYACEVTHQGLSSPVTKSFNRGEC

SEQ ID NO: 13419 - protein, 219 aa, Artificial Sequence
  source: /note="Description of Artificial Sequence: Synthetic polypeptide"
DVVMTQSPLSLPVTLGQPASISCRSSQSIVHSNGNTYLEWFQQRPGQSPRRLISKVSNRFSGVPDRFSGSGSGTDFTLKISRVEAEDVGVYYCFQGSHVPFTFGQGTKLEIKRTVAAPSVFIFPPSDEQLKSGTASVVCLLNNFYPREAKVQWKVDNALQSGNSQESVTEQDSKDSTYSLSSTLTLSKADYEKHKVYACEVTHQGLSSPVTKSFNRGEC

SEQ ID NO: 13420 - protein, 112 aa, Artificial Sequence
  source: /note="Description of Artificial Sequence: Synthetic polypeptide"
DVVMTQSPLSLPVTLGQPASISCRSSQSIVHSNGNTYLEWFQQRPGQSPRRLISKVSNRFSGVPDRFSGSGSGTDFTLKISRVEAEDVGVYYCFQGSHVPFTFGQGTKLEIK

SEQ ID NO: 13421 - protein, 238 aa, Artificial Sequence
  source: /note="Description of Artificial Sequence: Synthetic polypeptide"
MGWSCIILFLVATATGVHSDVVMTQSPLSLPVTLGQPASISCRSSQSIVHSNGNTYLNWFQQRPGQSPRRLISKVSNRFSGVPDRFSGSGSGTDFTLKISRVEAEDVGVYYCFQGSHVPFTFGQGTKLEIKRTVAAPSVFIFPPSDEQLKSGTASVVCLLNNFYPREAKVQWKVDNALQSGNSQESVTEQDSKDSTYSLSSTLTLSKADYEKHKVYACEVTHQGLSSPVTKSFNRGEC

SEQ ID NO: 13422 - protein, 219 aa, Artificial Sequence
  source: /note="Description of Artificial Sequence: Synthetic polypeptide"
DVVMTQSPLSLPVTLGQPASISCRSSQSIVHSNGNTYLNWFQQRPGQSPRRLISKVSNRFSGVPDRFSGSGSGTDFTLKISRVEAEDVGVYYCFQGSHVPFTFGQGTKLEIKRTVAAPSVFIFPPSDEQLKSGTASVVCLLNNFYPREAKVQWKVDNALQSGNSQESVTEQDSKDSTYSLSSTLTLSKADYEKHKVYACEVTHQGLSSPVTKSFNRGEC

SEQ ID NO: 13423 - protein, 112 aa, Artificial Sequence
  source: /note="Description of Artificial Sequence: Synthetic polypeptide"
DVVMTQSPLSLPVTLGQPASISCRSSQSIVHSNGNTYLNWFQQRPGQSPRRLISKVSNRFSGVPDRFSGSGSGTDFTLKISRVEAEDVGVYYCFQGSHVPFTFGQGTKLEIK

SEQ ID NO: 13424 - protein, 238 aa, Artificial Sequence
  source: /note="Description of Artificial Sequence: Synthetic polypeptide"
MGWSCIILFLVATATGVHSDVVMTQSPLSLPVTLGQPASISCRSSQSIVHSNGNTYLEWFQQRPGQSPRRLIYKVSNRFSGVPDRFSGSGSGTDFTLKISRVEAEDVGVYYCFQGSHVPFTFGQGTKLEIKRTVAAPSVFIFPPSDEQLKSGTASVVCLLNNFYPREAKVQWKVDNALQSGNSQESVTEQDSKDSTYSLSSTLTLSKADYEKHKVYACEVTHQGLSSPVTKSFNRGEC

SEQ ID NO: 13425 - protein, 219 aa, Artificial Sequence
  source: /note="Description of Artificial Sequence: Synthetic polypeptide"
DVVMTQSPLSLPVTLGQPASISCRSSQSIVHSNGNTYLEWFQQRPGQSPRRLIYKVSNRFSGVPDRFSGSGSGTDFTLKISRVEAEDVGVYYCFQGSHVPFTFGQGTKLEIKRTVAAPSVFIFPPSDEQLKSGTASVVCLLNNFYPREAKVQWKVDNALQSGNSQESVTEQDSKDSTYSLSSTLTLSKADYEKHKVYACEVTHQGLSSPVTKSFNRGEC

SEQ ID NO: 13426 - protein, 112 aa, Artificial Sequence
  source: /note="Description of Artificial Sequence: Synthetic polypeptide"
DVVMTQSPLSLPVTLGQPASISCRSSQSIVHSNGNTYLEWFQQRPGQSPRRLIYKVSNRFSGVPDRFSGSGSGTDFTLKISRVEAEDVGVYYCFQGSHVPFTFGQGTKLEIK

SEQ ID NO: 13427 - protein, 238 aa, Artificial Sequence
  source: /note="Description of Artificial Sequence: Synthetic polypeptide"
MGWSCIILFLVATATGVHSDIQMTQSPSSLSASVGDRVTITCRSSQSILHSNGNTYLEWYQQKPGKAPKLLIYKVSNRFSGVPSRFSGSGSGTDFTLTISSLQPEDFATYYCFQGSHVPFTFGQGTKLEIKRTVAAPSVFIFPPSDEQLKSGTASVVCLLNNFYPREAKVQWKVDNALQSGNSQESVTEQDSKDSTYSLSSTLTLSKADYEKHKVYACEVTHQGLSSPVTKSFNRGEC

SEQ ID NO: 13428 - protein, 219 aa, Artificial Sequence
  source: /note="Description of Artificial Sequence: Synthetic polypeptide"
DIQMTQSPSSLSASVGDRVTITCRSSQSILHSNGNTYLEWYQQKPGKAPKLLIYKVSNRFSGVPSRFSGSGSGTDFTLTISSLQPEDFATYYCFQGSHVPFTFGQGTKLEIKRTVAAPSVFIFPPSDEQLKSGTASVVCLLNNFYPREAKVQWKVDNALQSGNSQESVTEQDSKDSTYSLSSTLTLSKADYEKHKVYACEVTHQGLSSPVTKSFNRGEC

SEQ ID NO: 13429 - protein, 112 aa, Artificial Sequence
  source: /note="Description of Artificial Sequence: Synthetic polypeptide"
DIQMTQSPSSLSASVGDRVTITCRSSQSILHSNGNTYLEWYQQKPGKAPKLLIYKVSNRFSGVPSRFSGSGSGTDFTLTISSLQPEDFATYYCFQGSHVPFTFGQGTKLEIK

SEQ ID NO: 13430 - protein, 238 aa, Artificial Sequence
  source: /note="Description of Artificial Sequence: Synthetic polypeptide"
MGWSCIILFLVATATGVHSDVQMTQSPSSLSASVGDRVTITCRSSQSILHSNGNTYLEWYQQKPGKAPKLLICKVSNRFSGVPSRFSGSGSGTDFTLTISSLQPEDFATYYCFQGSHVPFTFGQGTKLEIKRTVAAPSVFIFPPSDEQLKSGTASVVCLLNNFYPREAKVQWKVDNALQSGNSQESVTEQDSKDSTYSLSSTLTLSKADYEKHKVYACEVTHQGLSSPVTKSFNRGEC

SEQ ID NO: 13431 - protein, 219 aa, Artificial Sequence
  source: /note="Description of Artificial Sequence: Synthetic polypeptide"
DVQMTQSPSSLSASVGDRVTITCRSSQSILHSNGNTYLEWYQQKPGKAPKLLICKVSNRFSGVPSRFSGSGSGTDFTLTISSLQPEDFATYYCFQGSHVPFTFGQGTKLEIKRTVAAPSVFIFPPSDEQLKSGTASVVCLLNNFYPREAKVQWKVDNALQSGNSQESVTEQDSKDSTYSLSSTLTLSKADYEKHKVYACEVTHQGLSSPVTKSFNRGEC

SEQ ID NO: 13432 - protein, 112 aa, Artificial Sequence
  source: /note="Description of Artificial Sequence: Synthetic polypeptide"
DVQMTQSPSSLSASVGDRVTITCRSSQSILHSNGNTYLEWYQQKPGKAPKLLICKVSNRFSGVPSRFSGSGSGTDFTLTISSLQPEDFATYYCFQGSHVPFTFGQGTKLEIK

SEQ ID NO: 13433 - protein, 238 aa, Artificial Sequence
  source: /note="Description of Artificial Sequence: Synthetic polypeptide"
MGWSCIILFLVATATGVHSDVQMTQSPSSLSASVGDRVTITCRSSQSILHSNGNTYLEWYQQKPGKAPKLLIYKVSNRFSGVPSRFSGSGSGTDFTLTISSLQPEDFATYYCFQGSHVPFTFGQGTKLEIKRTVAAPSVFIFPPSDEQLKSGTASVVCLLNNFYPREAKVQWKVDNALQSGNSQESVTEQDSKDSTYSLSSTLTLSKADYEKHKVYACEVTHQGLSSPVTKSFNRGEC

SEQ ID NO: 13434 - protein, 219 aa, Artificial Sequence
  source: /note="Description of Artificial Sequence: Synthetic polypeptide"
DVQMTQSPSSLSASVGDRVTITCRSSQSILHSNGNTYLEWYQQKPGKAPKLLIYKVSNRFSGVPSRFSGSGSGTDFTLTISSLQPEDFATYYCFQGSHVPFTFGQGTKLEIKRTVAAPSVFIFPPSDEQLKSGTASVVCLLNNFYPREAKVQWKVDNALQSGNSQESVTEQDSKDSTYSLSSTLTLSKADYEKHKVYACEVTHQGLSSPVTKSFNRGEC

SEQ ID NO: 13435 - protein, 112 aa, Artificial Sequence
  source: /note="Description of Artificial Sequence: Synthetic polypeptide"
DVQMTQSPSSLSASVGDRVTITCRSSQSILHSNGNTYLEWYQQKPGKAPKLLIYKVSNRFSGVPSRFSGSGSGTDFTLTISSLQPEDFATYYCFQGSHVPFTFGQGTKLEIK

SEQ ID NO: 13436 - protein, 238 aa, Artificial Sequence
  source: /note="Description of Artificial Sequence: Synthetic polypeptide"
MGWSCIILFLVATATGVHSDIQMTQSPSSLSASVGDRVTITCRSSQSILHSNGNTYLEWYQQKPGKAPKLLICKVSNRFSGVPSRFSGSGSGTDFTLTISSLQPEDFATYYCFQGSHVPFTFGQGTKLEIKRTVAAPSVFIFPPSDEQLKSGTASVVCLLNNFYPREAKVQWKVDNALQSGNSQESVTEQDSKDSTYSLSSTLTLSKADYEKHKVYACEVTHQGLSSPVTKSFNRGEC

SEQ ID NO: 13437 - protein, 219 aa, Artificial Sequence
  source: /note="Description of Artificial Sequence: Synthetic polypeptide"
DIQMTQSPSSLSASVGDRVTITCRSSQSILHSNGNTYLEWYQQKPGKAPKLLICKVSNRFSGVPSRFSGSGSGTDFTLTISSLQPEDFATYYCFQGSHVPFTFGQGTKLEIKRTVAAPSVFIFPPSDEQLKSGTASVVCLLNNFYPREAKVQWKVDNALQSGNSQESVTEQDSKDSTYSLSSTLTLSKADYEKHKVYACEVTHQGLSSPVTKSFNRGEC

SEQ ID NO: 13438 - protein, 112 aa, Artificial Sequence
  source: /note="Description of Artificial Sequence: Synthetic polypeptide"
DIQMTQSPSSLSASVGDRVTITCRSSQSILHSNGNTYLEWYQQKPGKAPKLLICKVSNRFSGVPSRFSGSGSGTDFTLTISSLQPEDFATYYCFQGSHVPFTFGQGTKLEIK

SEQ ID NO: 13439 - protein, 238 aa, Artificial Sequence
  source: /note="Description of Artificial Sequence: Synthetic polypeptide"
MGWSCIILFLVATATGVHSDVQMTQSPSSLSASVGDRVTITCRSSQSILHSNGNTYLEWYQQKPGKAPKLLISKVSNRFSGVPSRFSGSGSGTDFTLTISSLQPEDFATYYCFQGSHVPFTFGQGTKLEIKRTVAAPSVFIFPPSDEQLKSGTASVVCLLNNFYPREAKVQWKVDNALQSGNSQESVTEQDSKDSTYSLSSTLTLSKADYEKHKVYACEVTHQGLSSPVTKSFNRGEC

SEQ ID NO: 13440 - protein, 219 aa, Artificial Sequence
  source: /note="Description of Artificial Sequence: Synthetic polypeptide"
DVQMTQSPSSLSASVGDRVTITCRSSQSILHSNGNTYLEWYQQKPGKAPKLLISKVSNRFSGVPSRFSGSGSGTDFTLTISSLQPEDFATYYCFQGSHVPFTFGQGTKLEIKRTVAAPSVFIFPPSDEQLKSGTASVVCLLNNFYPREAKVQWKVDNALQSGNSQESVTEQDSKDSTYSLSSTLTLSKADYEKHKVYACEVTHQGLSSPVTKSFNRGEC

SEQ ID NO: 13441 - protein, 112 aa, Artificial Sequence
  source: /note="Description of Artificial Sequence: Synthetic polypeptide"
DVQMTQSPSSLSASVGDRVTITCRSSQSILHSNGNTYLEWYQQKPGKAPKLLISKVSNRFSGVPSRFSGSGSGTDFTLTISSLQPEDFATYYCFQGSHVPFTFGQGTKLEIK

SEQ ID NO: 13442 - protein, 238 aa, Artificial Sequence
  source: /note="Description of Artificial Sequence: Synthetic polypeptide"
MGWSCIILFLVATATGVHSDVQMTQSPSSLSASVGDRVTITCRSSQSIVHSNGNTYLEWYQQKPGKAPKLLISKVSNRFSGVPSRFSGSGSGTDFTLTISSLQPEDFATYYCFQGSHVPFTFGQGTKLEIKRTVAAPSVFIFPPSDEQLKSGTASVVCLLNNFYPREAKVQWKVDNALQSGNSQESVTEQDSKDSTYSLSSTLTLSKADYEKHKVYACEVTHQGLSSPVTKSFNRGEC

SEQ ID NO: 13443 - protein, 219 aa, Artificial Sequence
  source: /note="Description of Artificial Sequence: Synthetic polypeptide"
DVQMTQSPSSLSASVGDRVTITCRSSQSIVHSNGNTYLEWYQQKPGKAPKLLISKVSNRFSGVPSRFSGSGSGTDFTLTISSLQPEDFATYYCFQGSHVPFTFGQGTKLEIKRTVAAPSVFIFPPSDEQLKSGTASVVCLLNNFYPREAKVQWKVDNALQSGNSQESVTEQDSKDSTYSLSSTLTLSKADYEKHKVYACEVTHQGLSSPVTKSFNRGEC

SEQ ID NO: 13444 - protein, 112 aa, Artificial Sequence
  source: /note="Description of Artificial Sequence: Synthetic polypeptide"
DVQMTQSPSSLSASVGDRVTITCRSSQSIVHSNGNTYLEWYQQKPGKAPKLLISKVSNRFSGVPSRFSGSGSGTDFTLTISSLQPEDFATYYCFQGSHVPFTFGQGTKLEIK

SEQ ID NO: 13445 - protein, 238 aa, Artificial Sequence
  source: /note="Description of Artificial Sequence: Synthetic polypeptide"
MGWSCIILFLVATATGVHSDVQMTQSPSSLSASVGDRVTITCRSSQSIVHSNGNTYLNWYQQKPGKAPKLLISKVSNRFSGVPSRFSGSGSGTDFTLTISSLQPEDFATYYCFQGSHVPFTFGQGTKLEIKRTVAAPSVFIFPPSDEQLKSGTASVVCLLNNFYPREAKVQWKVDNALQSGNSQESVTEQDSKDSTYSLSSTLTLSKADYEKHKVYACEVTHQGLSSPVTKSFNRGEC

SEQ ID NO: 13446 - protein, 219 aa, Artificial Sequence
  source: /note="Description of Artificial Sequence: Synthetic polypeptide"
DVQMTQSPSSLSASVGDRVTITCRSSQSIVHSNGNTYLNWYQQKPGKAPKLLISKVSNRFSGVPSRFSGSGSGTDFTLTISSLQPEDFATYYCFQGSHVPFTFGQGTKLEIKRTVAAPSVFIFPPSDEQLKSGTASVVCLLNNFYPREAKVQWKVDNALQSGNSQESVTEQDSKDSTYSLSSTLTLSKADYEKHKVYACEVTHQGLSSPVTKSFNRGEC

SEQ ID NO: 13447 - protein, 112 aa, Artificial Sequence
  source: /note="Description of Artificial Sequence: Synthetic polypeptide"
DVQMTQSPSSLSASVGDRVTITCRSSQSIVHSNGNTYLNWYQQKPGKAPKLLISKVSNRFSGVPSRFSGSGSGTDFTLTISSLQPEDFATYYCFQGSHVPFTFGQGTKLEIK

SEQ ID NO: 13448 - protein, 238 aa, Artificial Sequence
  source: /note="Description of Artificial Sequence: Synthetic polypeptide"
MGWSCIILFLVATATGVHSDIQMTQSPSSLSASVGDRVTITCRSSQSILHSNGNTYLEWYQQKPGKAPKLLISKVSNRFSGVPSRFSGSGSGTDFTLTISSLQPEDFATYYCFQGSHVPFTFGQGTKLEIKRTVAAPSVFIFPPSDEQLKSGTASVVCLLNNFYPREAKVQWKVDNALQSGNSQESVTEQDSKDSTYSLSSTLTLSKADYEKHKVYACEVTHQGLSSPVTKSFNRGEC

SEQ ID NO: 13449 - protein, 219 aa, Artificial Sequence
  source: /note="Description of Artificial Sequence: Synthetic polypeptide"
DIQMTQSPSSLSASVGDRVTITCRSSQSILHSNGNTYLEWYQQKPGKAPKLLISKVSNRFSGVPSRFSGSGSGTDFTLTISSLQPEDFATYYCFQGSHVPFTFGQGTKLEIKRTVAAPSVFIFPPSDEQLKSGTASVVCLLNNFYPREAKVQWKVDNALQSGNSQESVTEQDSKDSTYSLSSTLTLSKADYEKHKVYACEVTHQGLSSPVTKSFNRGEC

SEQ ID NO: 13450 - protein, 112 aa, Artificial Sequence
  source: /note="Description of Artificial Sequence: Synthetic polypeptide"
DIQMTQSPSSLSASVGDRVTITCRSSQSILHSNGNTYLEWYQQKPGKAPKLLISKVSNRFSGVPSRFSGSGSGTDFTLTISSLQPEDFATYYCFQGSHVPFTFGQGTKLEIK

SEQ ID NO: 13451 - protein, 238 aa, Artificial Sequence
  source: /note="Description of Artificial Sequence: Synthetic polypeptide"
MGWSCIILFLVATATGVHSDVVMTQSPLSLPVTLGQPASISCRSSQSILHSNGNTYLEWFQQRPGQSPRLLISKVSNRFSGVPDRFSGSGSGTDFTLKISRVEAEDVGVYYCFQGSHVPFTFGQGTKLEIKRTVAAPSVFIFPPSDEQLKSGTASVVCLLNNFYPREAKVQWKVDNALQSGNSQESVTEQDSKDSTYSLSSTLTLSKADYEKHKVYACEVTHQGLSSPVTKSFNRGEC

SEQ ID NO: 13452 - protein, 219 aa, Artificial Sequence
  source: /note="Description of Artificial Sequence: Synthetic polypeptide"
DVVMTQSPLSLPVTLGQPASISCRSSQSILHSNGNTYLEWFQQRPGQSPRLLISKVSNRFSGVPDRFSGSGSGTDFTLKISRVEAEDVGVYYCFQGSHVPFTFGQGTKLEIKRTVAAPSVFIFPPSDEQLKSGTASVVCLLNNFYPREAKVQWKVDNALQSGNSQESVTEQDSKDSTYSLSSTLTLSKADYEKHKVYACEVTHQGLSSPVTKSFNRGEC

SEQ ID NO: 13453 - protein, 112 aa, Artificial Sequence
  source: /note="Description of Artificial Sequence: Synthetic polypeptide"
DVVMTQSPLSLPVTLGQPASISCRSSQSILHSNGNTYLEWFQQRPGQSPRLLISKVSNRFSGVPDRFSGSGSGTDFTLKISRVEAEDVGVYYCFQGSHVPFTFGQGTKLEIK

SEQ ID NO: 13454 - protein, 238 aa, Artificial Sequence
  source: /note="Description of Artificial Sequence: Synthetic polypeptide"
MGWSCIILFLVATATGVHSDVVMTQSPLSLPVTLGQPASISCRSSQSILHSNGNTYLEWYQQRPGQSPRRLISKVSNRFSGVPDRFSGSGSGTDFTLKISRVEAEDVGVYYCFQGSHVPFTFGQGTKLEIKRTVAAPSVFIFPPSDEQLKSGTASVVCLLNNFYPREAKVQWKVDNALQSGNSQESVTEQDSKDSTYSLSSTLTLSKADYEKHKVYACEVTHQGLSSPVTKSFNRGEC

SEQ ID NO: 13455 - protein, 219 aa, Artificial Sequence
  source: /note="Description of Artificial Sequence: Synthetic polypeptide"
DVVMTQSPLSLPVTLGQPASISCRSSQSILHSNGNTYLEWYQQRPGQSPRRLISKVSNRFSGVPDRFSGSGSGTDFTLKISRVEAEDVGVYYCFQGSHVPFTFGQGTKLEIKRTVAAPSVFIFPPSDEQLKSGTASVVCLLNNFYPREAKVQWKVDNALQSGNSQESVTEQDSKDSTYSLSSTLTLSKADYEKHKVYACEVTHQGLSSPVTKSFNRGEC

SEQ ID NO: 13456 - protein, 112 aa, Artificial Sequence
  source: /note="Description of Artificial Sequence: Synthetic polypeptide"
DVVMTQSPLSLPVTLGQPASISCRSSQSILHSNGNTYLEWYQQRPGQSPRRLISKVSNRFSGVPDRFSGSGSGTDFTLKISRVEAEDVGVYYCFQGSHVPFTFGQGTKLEIK

SEQ ID NO: 13457 - protein, 121 aa, Artificial Sequence
  source: /note="Description of Artificial Sequence: Synthetic polypeptide"
  source: /note="VH11 variable"
EVQLVESGGGLVQPGGSLRLSCAASGFTFSSFALNWVRQAPGKGLEWVGHIRSKTNNYATFYAASVKDRFTVSRDDSQNTAYLQMNSLKTEDTATYYCVRRGPRDSWFGYWGQGTLVTVSS

SEQ ID NO: 13458 - protein, 121 aa, Artificial Sequence
  source: /note="Description of Artificial Sequence: Synthetic polypeptide"
  source: /note="VH12 variable"
EVQLVESGGGLVQPGGSLRLSCAASGFAFNSFALNWVRQAPGKGLEWVGHIRSKTNNYATFYADSVKDRFTVSRDDSKNTAYLQMNSLKTEDTATYYCVRRGPRDSWFGYWGQGTLVTVSS

SEQ ID NO: 13459 - protein, 121 aa, Artificial Sequence
  source: /note="Description of Artificial Sequence: Synthetic polypeptide"
  source: /note="VH47 variable"
EVQLVESGGGLVQPGGSLRLSCAASGFAFNSFALNWVRQAPGKGLEWVGHIRSKTNNYATFYAASVKDRFTVSRDDSQNTAYLQMNSLKTEDTATYYCVRRGPRDSWFGYWGQGTLVTVSS

SEQ ID NO: 13460 - protein, 121 aa, Artificial Sequence
  source: /note="Description of Artificial Sequence: Synthetic polypeptide"
  source: /note="VH61 variable"
EVQLVESGGGLVQPGGSLRLSCAASGFTFNSFALNWVRQAPGKGLEWVVHIRSKTNNYATFYADSVKDRFTVSRDDSKNTAYLQMNSLKTEDTATYYCVRRGPRDSWFGYWGQGTLVTVSS

SEQ ID NO: 13461 - protein, 121 aa, Artificial Sequence
  source: /note="Description of Artificial Sequence: Synthetic polypeptide"
  source: /note="VH62 variable"
EVQLVESGGGLVQPGGSLRLSCAASGFAFNSFALNWVRQAPGKGLEWVVHIRSKTNNYATFYADSVKDRFTVSRDDSKNTAYLQMNSLKTEDTATYYCVRRGPRDSWFGYWGQGTLVTVSS

SEQ ID NO: 13462 - protein, 121 aa, Artificial Sequence
  source: /note="Description of Artificial Sequence: Synthetic polypeptide"
  source: /note="VH64 variable"
EVQLVESGGGLVQPGGSLRLSCAASGFTFNSFALNWVRQAPGKGLEWVVHIRSKTNNYATFYAASVKDRFTVSRDDSQNTAYLQMNSLKTEDTATYYCVRRGPRDSWFGYWGQGTLVTVSS

SEQ ID NO: 13463 - protein, 121 aa, Artificial Sequence
  source: /note="Description of Artificial Sequence: Synthetic polypeptide"
  source: /note="H65 variable"
EVQLVESGGGLVQPGGSLRLSCAASGFAFNSFALNWVRQAPGKGLEWVVHIRSKTNNYATFYAASVKDRFTVSRDDSQNTAYLQMNSLKTEDTATYYCVRRGPRDSWFGYWGQGTLVTVSS

SEQ ID NO: 13464 - protein, 112 aa, Artificial Sequence
  source: /note="Description of Artificial Sequence: Synthetic polypeptide"
  source: /note="VL15 variable"
DIVMTQSPLSLPVTLGEPASISCRSSQSIVHSNGNTYLEWYQQKPGQSPRLLIYTVSNRFSGVPDRFSGSGSGTDFTLKISRVEAEDLGVYYCFQGSHLPLTFGGGTKVEIK

SEQ ID NO: 13465 - protein, 112 aa, Artificial Sequence
  source: /note="Description of Artificial Sequence: Synthetic polypeptide"
  source: /note="VL36 variable"
DIVMTQSPLSLPVTLGDPASISCRSSQSIVHSNGNTYLEWYQQKPGQSPQLLIYTVSNRFSGVPDRFSGSGSGTDFTLKISRVEAEDLGVYYCFQGSHLPLTFGGGTKVEIK

SEQ ID NO: 13466 - protein, 112 aa, Artificial Sequence
  source: /note="Description of Artificial Sequence: Synthetic polypeptide"
  source: /note="VL46 variable"
DIVMTQSPLSLPVTLGEPASISCRSSQSIVHSNGNTYLEWYLQKPGQSPQLLIYTVSNRFSGVPDRFSGSGSGTDFTLKISRVEAEDLGVYYCFQGSHLPLTFGGGTKVEIK

SEQ ID NO: 13467 - protein, 112 aa, Artificial Sequence
  source: /note="Description of Artificial Sequence: Synthetic polypeptide"
  source: /note="VL47 variable"
DIVMTQSPLSLPVTLGDPASISCRSSQSIVHSNGNTYLEWYQQKPGQSPQRLIYTVSNRFSGVPDRFSGSGSGTDFTLKISRVEAEDLGVYYCFQGSHLPLTFGGGTKVEIK

SEQ ID NO: 13468 - protein, 112 aa, Artificial Sequence
  source: /note="Description of Artificial Sequence: Synthetic polypeptide"
  source: /note="VL48 variable"
DIVMTQSPLSLPVTLGDPASISCRSSQNIVHSNGNTYLEWYQQKPGQSPQLLIYTVSNRFSGVPDRFSGSGSGTDFTLKISRVEAEDLGVYYCFQGSHLPLTFGGGTKVEIK

SEQ ID NO: 13469 - protein, 112 aa, Artificial Sequence
  source: /note="Description of Artificial Sequence: Synthetic polypeptide"
  source: /note="VL50 variable"
DIVMTQSPLSLPVTLGDPASISCRSSQNIVHSNGNTYLEWYQQKPGQSPRLLIYTVSNRFSGVPDRFSGSGSGTDFTLKISRVEAEDLGVYYCFQGSHLPLTFGGGTKVEIK

SEQ ID NO: 13470 - protein, 238 aa, Mus musculus
MKLPVRLLVLMFWIPGSSSDILMTQTPLSLPVSLGDQASISCRSSQNIVHSNGNTYLEWYLQKPGQSPKVLIYTVSNRFSGVPDRFSGSGSGTDFTLKISRVEAEDLGVYYCFQGSHLPLTFGGGTKLELKRADAAPTVSIFPPSSEQLTSGGASVVCFLNNFYPKDINVKWKIDGSERQNGVLNSWTDQDSKDSTYSMSSTLTLTKDEYERHNSYTCEATHKTSTSPIVKSFNRNEC

SEQ ID NO: 13471 - protein, 474 aa, Mus musculus
MTLNRLLGLKWVFFVVFYQGVHCEVQLVESGGGLVQPKGSLKLSCAASGFAFNSFALNWVRQAPGKSLEWVVHIRSKTNNYATFYADSVKDRFTVSRDDSQSMVYLQMNNLKTEDTGIYYCVRRGPRDSWFGYWGQGTLVTVSAAKTTAPSVYPLAPVCGDTTGSSVTLGCLVKGYFPEPVTLTWNSGSLSSGVHTFPAVLQSDLYTLSSSVTVTSSTWPSQSITCNVAHPASSTKVDKKIEPRGPTIKPCPPCKCPAPNLLGGPSVFIFPPKIKDVLMISLSPIVTCVVVDVSEDDPDVQISWFVNNVEVHTAQTQTHREDYNSTLRVVSALPIQHQDWMSGKEFKCKVNNKDLPAPIERTISKPKGSVRAPQVYVLPPPEEEMTKKQVTLTCMVTDFMPEDIYVEWTNNGKTELNYKNTEPVLDSDGSYFMYSKLRVEKKNWVERNSYSCSVVHEGLHNHHTTKSFSRTPGK

SEQ ID NO: 13472 - protein, 219 aa, Artificial Sequence
  source: /note="Description of Artificial Sequence: Synthetic polypeptide"
DILMTQTPLSLPVSLGDQASISCRSSQNIVHSNGNTYLEWYLQKPGQSPKVLIYTVSNRFSGVPDRFSGSGSGTDFTLKISRVEAEDLGVYYCFQGSHLPLTFGGGTKLELKRTVAAPSVFIFPPSDEQLKSGTASVVCLLNNFYPREAKVQWKVDNALQSGNSQESVTEQDSKDSTYSLSSTLTLSKADYEKHKVYACEVTHQGLSSPVTKSFNRGEC

SEQ ID NO: 13473 - protein, 450 aa, Artificial Sequence
  source: /note="Description of Artificial Sequence: Synthetic polypeptide"
EVQLVESGGGLVQPKGSLKLSCAASGFAFNSFALNWVRQAPGKSLEWVVHIRSKTNNYATFYADSVKDRFTVSRDDSQSMVYLQMNNLKTEDTGIYYCVRRGPRDSWFGYWGQGTLVTVSAASTKGPSVFPLAPSSKSTSGGTAALGCLVKDYFPEPVTVSWNSGALTSGVHTFPAVLQSSGLYSLSSVVTVPSSSLGTQTYICNVNHKPSNTKVDKKVEPKSCDKTHTCPPCPAPELLGGPSVFLFPPKPKDTLMISRTPEVTCVVVDVSHEDPEVKFNWYVDGVEVHNAKTKPREEQYNSTYRVVSVLTVLHQDWLNGKEYKCKVSNKALPAPIEKTISKAKGQPREPQVYTLPPSRDELTKNQVSLTCLVKGFYPSDIAVEWESNGQPENNYKTTPPVLDSDGSFFLYSKLTVDKSRWQQGNVFSCSVMHEALHNHYTQKSLSLSPG

SEQ ID NO: 13474 - protein, 112 aa, Artificial Sequence
  source: /note="Description of Artificial Sequence: Synthetic polypeptide"
  source: /note="Ta1505-VL00-Mouse, VL"
DILMTQTPLSLPVSLGDQASISCRSSQNIVHSNGNTYLEWYLQKPGQSPKVLIYTVSNRFSGVPDRFSGSGSGTDFTLKISRVEAEDLGVYYCFQGSHLPLTFGGGTKLELK

SEQ ID NO: 13475 - protein, 219 aa, Artificial Sequence
  source: /note="Description of Artificial Sequence: Synthetic polypeptide"
  source: /note="Ta1505-VL00-Mouse, light chain"
DILMTQTPLSLPVSLGDQASISCRSSQNIVHSNGNTYLEWYLQKPGQSPKVLIYTVSNRFSGVPDRFSGSGSGTDFTLKISRVEAEDLGVYYCFQGSHLPLTFGGGTKLELKRADAAPTVSIFPPSSEQLTSGGASVVCFLNNFYPKDINVKWKIDGSERQNGVLNSWTDQDSKDSTYSMSSTLTLTKDEYERHNSYTCEATHKTSTSPIVKSFNRNEC

SEQ ID NO: 13476 - protein, 121 aa, Artificial Sequence
  source: /note="Description of Artificial Sequence: Synthetic polypeptide"
  source: /note="Ta1505-VL00-Mouse, VH"
EVQLVESGGGLVQPKGSLKLSCAASGFAFNSFALNWVRQAPGKSLEWVVHIRSKTNNYATFYADSVKDRFTVSRDDSQSMVYLQMNNLKTEDTGIYYCVRRGPRDSWFGYWGQGTLVTVSA

SEQ ID NO: 13477 - protein, 451 aa, Artificial Sequence
  source: /note="Description of Artificial Sequence: Synthetic polypeptide"
  source: /note="Ta1505-VL00-Mouse, heavy chain"
EVQLVESGGGLVQPKGSLKLSCAASGFAFNSFALNWVRQAPGKSLEWVVHIRSKTNNYATFYADSVKDRFTVSRDDSQSMVYLQMNNLKTEDTGIYYCVRRGPRDSWFGYWGQGTLVTVSAAKTTAPSVYPLAPVCGDTTGSSVTLGCLVKGYFPEPVTLTWNSGSLSSGVHTFPAVLQSDLYTLSSSVTVTSSTWPSQSITCNVAHPASSTKVDKKIEPRGPTIKPCPPCKCPAPNLLGGPSVFIFPPKIKDVLMISLSPIVTCVVVDVSEDDPDVQISWFVNNVEVHTAQTQTHREDYNSTLRVVSALPIQHQDWMSGKEFKCKVNNKDLPAPIERTISKPKGSVRAPQVYVLPPPEEEMTKKQVTLTCMVTDFMPEDIYVEWTNNGKTELNYKNTEPVLDSDGSYFMYSKLRVEKKNWVERNSYSCSVVHEGLHNHHTTKSFSRTPGK

SEQ ID NO: 13478 - protein, 112 aa, Artificial Sequence
  source: /note="Description of Artificial Sequence: Synthetic polypeptide"
  source: /note="Ta1505-VL46_G34A, VL"
DIVMTQSPLSLPVTLGEPASISCRSSQSIVHSNANTYLEWYLQKPGQSPQLLIYTVSNRFSGVPDRFSGSGSGTDFTLKISRVEAEDLGVYYCFQGSHLPLTFGGGTKVEIK

SEQ ID NO: 13479 - protein, 112 aa, Artificial Sequence
  source: /note="Description of Artificial Sequence: Synthetic polypeptide"
  source: /note="Ta1505-VL46_G34S, VL"
DIVMTQSPLSLPVTLGEPASISCRSSQSIVHSNSNTYLEWYLQKPGQSPQLLIYTVSNRFSGVPDRFSGSGSGTDFTLKISRVEAEDLGVYYCFQGSHLPLTFGGGTKVEIK

SEQ ID NO: 13480 - protein, 112 aa, Artificial Sequence
  source: /note="Description of Artificial Sequence: Synthetic polypeptide"
  source: /note="Ta1505-VL46_G34T, VL"
DIVMTQSPLSLPVTLGEPASISCRSSQSIVHSNTNTYLEWYLQKPGQSPQLLIYTVSNRFSGVPDRFSGSGSGTDFTLKISRVEAEDLGVYYCFQGSHLPLTFGGGTKVEIK

SEQ ID NO: 13481 - protein, 112 aa, Artificial Sequence
  source: /note="Description of Artificial Sequence: Synthetic polypeptide"
  source: /note="Ta1505-VL46_N33Q, VL"
DIVMTQSPLSLPVTLGEPASISCRSSQSIVHSQGNTYLEWYLQKPGQSPQLLIYTVSNRFSGVPDRFSGSGSGTDFTLKISRVEAEDLGVYYCFQGSHLPLTFGGGTKVEIK

SEQ ID NO: 13482 - protein, 112 aa, Artificial Sequence
  source: /note="Description of Artificial Sequence: Synthetic polypeptide"
  source: /note="Ta1505-VL46_N33Q_G34A, VL"
DIVMTQSPLSLPVTLGEPASISCRSSQSIVHSQANTYLEWYLQKPGQSPQLLIYTVSNRFSGVPDRFSGSGSGTDFTLKISRVEAEDLGVYYCFQGSHLPLTFGGGTKVEIK

SEQ ID NO: 13483 - protein, 112 aa, Artificial Sequence
  source: /note="Description of Artificial Sequence: Synthetic polypeptide"
  source: /note="Ta1505-VL46_N33D, VL"
DIVMTQSPLSLPVTLGEPASISCRSSQSIVHSDGNTYLEWYLQKPGQSPQLLIYTVSNRFSGVPDRFSGSGSGTDFTLKISRVEAEDLGVYYCFQGSHLPLTFGGGTKVEIK

SEQ ID NO: 13484 - protein, 112 aa, Artificial Sequence
  source: /note="Description of Artificial Sequence: Synthetic polypeptide"
  source: /note="Ta1505-VL46_N33S, VL"
DIVMTQSPLSLPVTLGEPASISCRSSQSIVHSSGNTYLEWYLQKPGQSPQLLIYTVSNRFSGVPDRFSGSGSGTDFTLKISRVEAEDLGVYYCFQGSHLPLTFGGGTKVEIK

SEQ ID NO: 13485 - protein, 112 aa, Artificial Sequence
  source: /note="Description of Artificial Sequence: Synthetic polypeptide"
  source: /note="Ta1505-VL46_N33T, VL"
DIVMTQSPLSLPVTLGEPASISCRSSQSIVHSTGNTYLEWYLQKPGQSPQLLIYTVSNRFSGVPDRFSGSGSGTDFTLKISRVEAEDLGVYYCFQGSHLPLTFGGGTKVEIK

SEQ ID NO: 13486 - protein, 112 aa, Artificial Sequence
  source: /note="Description of Artificial Sequence: Synthetic polypeptide"
  source: /note="Ta1505-VL46_S28N, VL"
DIVMTQSPLSLPVTLGEPASISCRSSQNIVHSNGNTYLEWYLQKPGQSPQLLIYTVSNRFSGVPDRFSGSGSGTDFTLKISRVEAEDLGVYYCFQGSHLPLTFGGGTKVEIK

SEQ ID NO: 13487 - protein, 112 aa, Artificial Sequence
  source: /note="Description of Artificial Sequence: Synthetic polypeptide"
  source: /note="Ta1505-VL46_G34A_S28N, VL"
DIVMTQSPLSLPVTLGEPASISCRSSQNIVHSNANTYLEWYLQKPGQSPQLLIYTVSNRFSGVPDRFSGSGSGTDFTLKISRVEAEDLGVYYCFQGSHLPLTFGGGTKVEIK

SEQ ID NO: 13488 - protein, 219 aa, Artificial Sequence
  source: /note="Description of Artificial Sequence: Synthetic polypeptide"
  source: /note="hu VL46 / VH11 G34A S28N IgG1 or hu VL46 / VH11 G34A S28N"
DIVMTQSPLSLPVTLGEPASISCRSSQNIVHSNANTYLEWYLQKPGQSPQLLIYTVSNRFSGVPDRFSGSGSGTDFTLKISRVEAEDLGVYYCFQGSHLPLTFGGGTKVEIKRTVAAPSVFIFPPSDEQLKSGTASVVCLLNNFYPREAKVQWKVDNALQSGNSQESVTEQDSKDSTYSLSSTLTLSKADYEKHKVYACEVTHQGLSSPVTKSFNRGEC

SEQ ID NO: 13489 - protein, 451 aa, Artificial Sequence
  source: /note="Description of Artificial Sequence: Synthetic polypeptide"
  source: /note="hu VL46 / VH11 G34A S28N IgG1, heavy chain"
EVQLVESGGGLVQPGGSLRLSCAASGFTFSSFALNWVRQAPGKGLEWVGHIRSKTNNYATFYAASVKDRFTVSRDDSQNTAYLQMNSLKTEDTATYYCVRRGPRDSWFGYWGQGTLVTVSSASTKGPSVFPLAPSSKSTSGGTAALGCLVKDYFPEPVTVSWNSGALTSGVHTFPAVLQSSGLYSLSSVVTVPSSSLGTQTYICNVNHKPSNTKVDKKVEPKSCDKTHTCPPCPAPELLGGPSVFLFPPKPKDTLMISRTPEVTCVVVDVSHEDPEVKFNWYVDGVEVHNAKTKPREEQYNSTYRVVSVLTVLHQDWLNGKEYKCKVSNKALPAPIEKTISKAKGQPREPQVYTLPPSRDELTKNQVSLTCLVKGFYPSDIAVEWESNGQPENNYKTTPPVLDSDGSFFLYSKLTVDKSRWQQGNVFSCSVMHEALHNHYTQKSLSLSPGK

SEQ ID NO: 13490 - protein, 448 aa, Artificial Sequence
  source: /note="Description of Artificial Sequence: Synthetic polypeptide"
  source: /note="hu VL46 / VH11 G34A S28N IgG4-S228P, heavy chain"
EVQLVESGGGLVQPGGSLRLSCAASGFTFSSFALNWVRQAPGKGLEWVGHIRSKTNNYATFYAASVKDRFTVSRDDSQNTAYLQMNSLKTEDTATYYCVRRGPRDSWFGYWGQGTLVTVSSASTKGPSVFPLAPCSRSTSESTAALGCLVKDYFPEPVTVSWNSGALTSGVHTFPAVLQSSGLYSLSSVVTVPSSSLGTKTYTCNVDHKPSNTKVDKRVESKYGPPCPPCPAPEFLGGPSVFLFPPKPKDTLMISRTPEVTCVVVDVSQEDPEVQFNWYVDGVEVHNAKTKPREEQFNSTYRVVSVLTVLHQDWLNGKEYKCKVSNKGLPSSIEKTISKAKGQPREPQVYTLPPSQEEMTKNQVSLTCLVKGFYPSDIAVEWESNGQPENNYKTTPPVLDSDGSFFLYSRLTVDKSRWQEGNVFSCSVMHEALHNHYTQKSLSLSLGK

SEQ ID NO: 13491 - protein, 219 aa, Artificial Sequence
  source: /note="Description of Artificial Sequence: Synthetic polypeptide"
  source: /note="Humanized variant light chain, L1"
DIVMTQSPLSLPVTLGQPASISCRSSQSIVHSNGNTYLEWYQQKPGQSPRLLIYTVSNRFSGVPDRFSGSGSGTDFTLKISRVEAEDVGVYYCFQGSHLPLTFGGGTKVEIKRTVAAPSVFIFPPSDEQLKSGTASVVCLLNNFYPREAKVQWKVDNALQSGNSQESVTEQDSKDSTYSLSSTLTLSKADYEKHKVYACEVTHQGLSSPVTKSFNRGEC

SEQ ID NO: 13492 - protein, 219 aa, Artificial Sequence
  source: /note="Description of Artificial Sequence: Synthetic polypeptide"
  source: /note="Humanized variant light chain, L2"
DIVMTQSPLSLPVTLGQPASISCRSSQSISHSNGNTYLEWYQQKPGQSPRLLIYTASNRFSGVPDRFSGSGSGTDFTLKISRVEAEDVGVYYCFQGSHLPLTFGGGTKVEIKRTVAAPSVFIFPPSDEQLKSGTASVVCLLNNFYPREAKVQWKVDNALQSGNSQESVTEQDSKDSTYSLSSTLTLSKADYEKHKVYACEVTHQGLSSPVTKSFNRGEC

SEQ ID NO: 13493 - protein, 219 aa, Artificial Sequence
  source: /note="Description of Artificial Sequence: Synthetic polypeptide"
  source: /note="Humanized variant light chain, L3"
DIVMTQSPLSLPVTLGQPASISCRSSQSISHSNGNTYLEWYQQKPGQSPRLLIYTASNRDSGVPDRFSGSGSGTDFTLKISRVEAEDVGVYYCFQGSHLPLTFGGGTKVEIKRTVAAPSVFIFPPSDEQLKSGTASVVCLLNNFYPREAKVQWKVDNALQSGNSQESVTEQDSKDSTYSLSSTLTLSKADYEKHKVYACEVTHQGLSSPVTKSFNRGEC

SEQ ID NO: 13494 - protein, 451 aa, Artificial Sequence
  source: /note="Description of Artificial Sequence: Synthetic polypeptide"
  source: /note="Humanized variant heavy chain, H1"
EVQLVESGGGLVQPGGSLRLSCAASGFAFNSFALNWVRQAPGKGLEWVGHIRSKTNNYATFYAASVKGRFTVSRDDSKNSVYLQMNSLKTEDTAVYYCVRRGPRDSWFGYWGQGTLVTVSSASTKGPSVFPLAPSSKSTSGGTAALGCLVKDYFPEPVTVSWNSGALTSGVHTFPAVLQSSGLYSLSSVVTVPSSSLGTQTYICNVNHKPSNTKVDKKVEPKSCDKTHTCPPCPAPELLGGPSVFLFPPKPKDTLMISRTPEVTCVVVDVSHEDPEVKFNWYVDGVEVHNAKTKPREEQYNSTYRVVSVLTVLHQDWLNGKEYKCKVSNKALPAPIEKTISKAKGQPREPQVYTLPPSRDELTKNQVSLTCLVKGFYPSDIAVEWESNGQPENNYKTTPPVLDSDGSFFLYSKLTVDKSRWQQGNVFSCSVMHEALHNHYTQKSLSLSPGK

SEQ ID NO: 13495 - protein, 451 aa, Artificial Sequence
  source: /note="Description of Artificial Sequence: Synthetic polypeptide"
  source: /note="Humanized variant heavy chain, H2"
EVQLVESGGGLVQPGGSLRLSCAASGFTFSSFALNWVRQAPGKGLEWVGHIRSKTNNYATFYAASVKGRFTVSRDDSKNTAYLQMNSLKTEDTATYYCVRRGPRDSWFGYWGQGTLVTVSSASTKGPSVFPLAPSSKSTSGGTAALGCLVKDYFPEPVTVSWNSGALTSGVHTFPAVLQSSGLYSLSSVVTVPSSSLGTQTYICNVNHKPSNTKVDKKVEPKSCDKTHTCPPCPAPELLGGPSVFLFPPKPKDTLMISRTPEVTCVVVDVSHEDPEVKFNWYVDGVEVHNAKTKPREEQYNSTYRVVSVLTVLHQDWLNGKEYKCKVSNKALPAPIEKTISKAKGQPREPQVYTLPPSRDELTKNQVSLTCLVKGFYPSDIAVEWESNGQPENNYKTTPPVLDSDGSFFLYSKLTVDKSRWQQGNVFSCSVMHEALHNHYTQKSLSLSPGK

SEQ ID NO: 13496 - protein, 219 aa, Artificial Sequence
  source: /note="Description of Artificial Sequence: Synthetic polypeptide"
  source: /note="VL46_kappa"
DIVMTQSPLSLPVTLGEPASISCRSSQSIVHSNGNTYLEWYLQKPGQSPQLLIYTVSNRFSGVPDRFSGSGSGTDFTLKISRVEAEDLGVYYCFQGSHLPLTFGGGTKVEIKRTVAAPSVFIFPPSDEQLKSGTASVVCLLNNFYPREAKVQWKVDNALQSGNSQESVTEQDSKDSTYSLSSTLTLSKADYEKHKVYACEVTHQGLSSPVTKSFNRGEC

SEQ ID NO: 13497 - protein, 218 aa, Artificial Sequence
  source: /note="Description of Artificial Sequence: Synthetic polypeptide"
  source: /note="VL46_lambda"
DIVMTQSPLSLPVTLGEPASISCRSSQSIVHSNGNTYLEWYLQKPGQSPQLLIYTVSNRFSGVPDRFSGSGSGTDFTLKISRVEAEDLGVYYCFQGSHLPLTFGGGTKVEIKGQPKAAPSVTLFPPSSEELQANKATLVCLISDFYPGAVTVAWKADSSPVKAGVETTTPSKQSNNKYAASSYLSLTPEQWKSHRSYSCQVTHEGSTVEKTVAPTECS

SEQ ID NO: 13498 - protein, 219 aa, Artificial Sequence
  source: /note="Description of Artificial Sequence: Synthetic polypeptide"
  source: /note="VL47 kappa"
DIVMTQSPLSLPVTLGDPASISCRSSQSIVHSNGNTYLEWYQQKPGQSPQRLIYTVSNRFSGVPDRFSGSGSGTDFTLKISRVEAEDLGVYYCFQGSHLPLTFGGGTKVEIKRTVAAPSVFIFPPSDEQLKSGTASVVCLLNNFYPREAKVQWKVDNALQSGNSQESVTEQDSKDSTYSLSSTLTLSKADYEKHKVYACEVTHQGLSSPVTKSFNRGEC

SEQ ID NO: 13499 - protein, 218 aa, Artificial Sequence
  source: /note="Description of Artificial Sequence: Synthetic polypeptide"
  source: /note="VL47 lambda"
DIVMTQSPLSLPVTLGDPASISCRSSQSIVHSNGNTYLEWYQQKPGQSPQRLIYTVSNRFSGVPDRFSGSGSGTDFTLKISRVEAEDLGVYYCFQGSHLPLTFGGGTKVEIKGQPKAAPSVTLFPPSSEELQANKATLVCLISDFYPGAVTVAWKADSSPVKAGVETTTPSKQSNNKYAASSYLSLTPEQWKSHRSYSCQVTHEGSTVEKTVAPTECS

SEQ ID NO: 13500 - protein, 219 aa, Artificial Sequence
  source: /note="Description of Artificial Sequence: Synthetic polypeptide"
  source: /note="VL46_G34A kappa"
DIVMTQSPLSLPVTLGEPASISCRSSQSIVHSNANTYLEWYLQKPGQSPQLLIYTVSNRFSGVPDRFSGSGSGTDFTLKISRVEAEDLGVYYCFQGSHLPLTFGGGTKVEIKRTVAAPSVFIFPPSDEQLKSGTASVVCLLNNFYPREAKVQWKVDNALQSGNSQESVTEQDSKDSTYSLSSTLTLSKADYEKHKVYACEVTHQGLSSPVTKSFNRGEC

SEQ ID NO: 13501 - protein, 218 aa, Artificial Sequence
  source: /note="Description of Artificial Sequence: Synthetic polypeptide"
  source: /note="VL46_G34A lambda"
DIVMTQSPLSLPVTLGEPASISCRSSQSIVHSNANTYLEWYLQKPGQSPQLLIYTVSNRFSGVPDRFSGSGSGTDFTLKISRVEAEDLGVYYCFQGSHLPLTFGGGTKVEIKGQPKAAPSVTLFPPSSEELQANKATLVCLISDFYPGAVTVAWKADSSPVKAGVETTTPSKQSNNKYAASSYLSLTPEQWKSHRSYSCQVTHEGSTVEKTVAPTECS

SEQ ID NO: 13502 - protein, 219 aa, Artificial Sequence
  source: /note="Description of Artificial Sequence: Synthetic polypeptide"
  source: /note="VL46_G34S kappa"
DIVMTQSPLSLPVTLGEPASISCRSSQSIVHSNSNTYLEWYLQKPGQSPQLLIYTVSNRFSGVPDRFSGSGSGTDFTLKISRVEAEDLGVYYCFQGSHLPLTFGGGTKVEIKRTVAAPSVFIFPPSDEQLKSGTASVVCLLNNFYPREAKVQWKVDNALQSGNSQESVTEQDSKDSTYSLSSTLTLSKADYEKHKVYACEVTHQGLSSPVTKSFNRGEC

SEQ ID NO: 13503 - protein, 218 aa, Artificial Sequence
  source: /note="Description of Artificial Sequence: Synthetic polypeptide"
  source: /note="VL46_G34S lambda"
DIVMTQSPLSLPVTLGEPASISCRSSQSIVHSNSNTYLEWYLQKPGQSPQLLIYTVSNRFSGVPDRFSGSGSGTDFTLKISRVEAEDLGVYYCFQGSHLPLTFGGGTKVEIKGQPKAAPSVTLFPPSSEELQANKATLVCLISDFYPGAVTVAWKADSSPVKAGVETTTPSKQSNNKYAASSYLSLTPEQWKSHRSYSCQVTHEGSTVEKTVAPTECS

SEQ ID NO: 13504 - protein, 219 aa, Artificial Sequence
  source: /note="Description of Artificial Sequence: Synthetic polypeptide"
  source: /note="VL46_G34T kappa"
DIVMTQSPLSLPVTLGEPASISCRSSQSIVHSNTNTYLEWYLQKPGQSPQLLIYTVSNRFSGVPDRFSGSGSGTDFTLKISRVEAEDLGVYYCFQGSHLPLTFGGGTKVEIKRTVAAPSVFIFPPSDEQLKSGTASVVCLLNNFYPREAKVQWKVDNALQSGNSQESVTEQDSKDSTYSLSSTLTLSKADYEKHKVYACEVTHQGLSSPVTKSFNRGEC

SEQ ID NO: 13505 - protein, 218 aa, Artificial Sequence
  source: /note="Description of Artificial Sequence: Synthetic polypeptide"
  source: /note="VL46_G34T lambda"
DIVMTQSPLSLPVTLGEPASISCRSSQSIVHSNTNTYLEWYLQKPGQSPQLLIYTVSNRFSGVPDRFSGSGSGTDFTLKISRVEAEDLGVYYCFQGSHLPLTFGGGTKVEIKGQPKAAPSVTLFPPSSEELQANKATLVCLISDFYPGAVTVAWKADSSPVKAGVETTTPSKQSNNKYAASSYLSLTPEQWKSHRSYSCQVTHEGSTVEKTVAPTECS

SEQ ID NO: 13506 - protein, 219 aa, Artificial Sequence
  source: /note="Description of Artificial Sequence: Synthetic polypeptide"
  source: /note="VL46_N33Q kappa"
DIVMTQSPLSLPVTLGEPASISCRSSQSIVHSQGNTYLEWYLQKPGQSPQLLIYTVSNRFSGVPDRFSGSGSGTDFTLKISRVEAEDLGVYYCFQGSHLPLTFGGGTKVEIKRTVAAPSVFIFPPSDEQLKSGTASVVCLLNNFYPREAKVQWKVDNALQSGNSQESVTEQDSKDSTYSLSSTLTLSKADYEKHKVYACEVTHQGLSSPVTKSFNRGEC

SEQ ID NO: 13507 - protein, 218 aa, Artificial Sequence
  source: /note="Description of Artificial Sequence: Synthetic polypeptide"
  source: /note="VL46_N33Q lambda"
DIVMTQSPLSLPVTLGEPASISCRSSQSIVHSQGNTYLEWYLQKPGQSPQLLIYTVSNRFSGVPDRFSGSGSGTDFTLKISRVEAEDLGVYYCFQGSHLPLTFGGGTKVEIKGQPKAAPSVTLFPPSSEELQANKATLVCLISDFYPGAVTVAWKADSSPVKAGVETTTPSKQSNNKYAASSYLSLTPEQWKSHRSYSCQVTHEGSTVEKTVAPTECS

SEQ ID NO: 13508 - protein, 219 aa, Artificial Sequence
  source: /note="Description of Artificial Sequence: Synthetic polypeptide"
  source: /note="VL46_N33Q_G34A kappa"
DIVMTQSPLSLPVTLGEPASISCRSSQSIVHSQANTYLEWYLQKPGQSPQLLIYTVSNRFSGVPDRFSGSGSGTDFTLKISRVEAEDLGVYYCFQGSHLPLTFGGGTKVEIKRTVAAPSVFIFPPSDEQLKSGTASVVCLLNNFYPREAKVQWKVDNALQSGNSQESVTEQDSKDSTYSLSSTLTLSKADYEKHKVYACEVTHQGLSSPVTKSFNRGEC

SEQ ID NO: 13509 - protein, 218 aa, Artificial Sequence
  source: /note="Description of Artificial Sequence: Synthetic polypeptide"
  source: /note="VL46_N33Q_G34A lambda"
DIVMTQSPLSLPVTLGEPASISCRSSQSIVHSQANTYLEWYLQKPGQSPQLLIYTVSNRFSGVPDRFSGSGSGTDFTLKISRVEAEDLGVYYCFQGSHLPLTFGGGTKVEIKGQPKAAPSVTLFPPSSEELQANKATLVCLISDFYPGAVTVAWKADSSPVKAGVETTTPSKQSNNKYAASSYLSLTPEQWKSHRSYSCQVTHEGSTVEKTVAPTECS

SEQ ID NO: 13510 - protein, 219 aa, Artificial Sequence
  source: /note="Description of Artificial Sequence: Synthetic polypeptide"
  source: /note="VL46_N33D kappa"
DIVMTQSPLSLPVTLGEPASISCRSSQSIVHSDGNTYLEWYLQKPGQSPQLLIYTVSNRFSGVPDRFSGSGSGTDFTLKISRVEAEDLGVYYCFQGSHLPLTFGGGTKVEIKRTVAAPSVFIFPPSDEQLKSGTASVVCLLNNFYPREAKVQWKVDNALQSGNSQESVTEQDSKDSTYSLSSTLTLSKADYEKHKVYACEVTHQGLSSPVTKSFNRGEC

SEQ ID NO: 13511 - protein, 218 aa, Artificial Sequence
  source: /note="Description of Artificial Sequence: Synthetic polypeptide"
  source: /note="VL46_N33D lambda"
DIVMTQSPLSLPVTLGEPASISCRSSQSIVHSDGNTYLEWYLQKPGQSPQLLIYTVSNRFSGVPDRFSGSGSGTDFTLKISRVEAEDLGVYYCFQGSHLPLTFGGGTKVEIKGQPKAAPSVTLFPPSSEELQANKATLVCLISDFYPGAVTVAWKADSSPVKAGVETTTPSKQSNNKYAASSYLSLTPEQWKSHRSYSCQVTHEGSTVEKTVAPTECS

SEQ ID NO: 13512 - protein, 219 aa, Artificial Sequence
  source: /note="Description of Artificial Sequence: Synthetic polypeptide"
  source: /note="VL46_N33S kappa"
DIVMTQSPLSLPVTLGEPASISCRSSQSIVHSSGNTYLEWYLQKPGQSPQLLIYTVSNRFSGVPDRFSGSGSGTDFTLKISRVEAEDLGVYYCFQGSHLPLTFGGGTKVEIKRTVAAPSVFIFPPSDEQLKSGTASVVCLLNNFYPREAKVQWKVDNALQSGNSQESVTEQDSKDSTYSLSSTLTLSKADYEKHKVYACEVTHQGLSSPVTKSFNRGEC

SEQ ID NO: 13513 - protein, 218 aa, Artificial Sequence
  source: /note="Description of Artificial Sequence: Synthetic polypeptide"
  source: /note="VL46_N33S lambda"
DIVMTQSPLSLPVTLGEPASISCRSSQSIVHSSGNTYLEWYLQKPGQSPQLLIYTVSNRFSGVPDRFSGSGSGTDFTLKISRVEAEDLGVYYCFQGSHLPLTFGGGTKVEIKGQPKAAPSVTLFPPSSEELQANKATLVCLISDFYPGAVTVAWKADSSPVKAGVETTTPSKQSNNKYAASSYLSLTPEQWKSHRSYSCQVTHEGSTVEKTVAPTECS

SEQ ID NO: 13514 - protein, 219 aa, Artificial Sequence
  source: /note="Description of Artificial Sequence: Synthetic polypeptide"
  source: /note="VL46_N33T kappa"
DIVMTQSPLSLPVTLGEPASISCRSSQSIVHSTGNTYLEWYLQKPGQSPQLLIYTVSNRFSGVPDRFSGSGSGTDFTLKISRVEAEDLGVYYCFQGSHLPLTFGGGTKVEIKRTVAAPSVFIFPPSDEQLKSGTASVVCLLNNFYPREAKVQWKVDNALQSGNSQESVTEQDSKDSTYSLSSTLTLSKADYEKHKVYACEVTHQGLSSPVTKSFNRGEC

SEQ ID NO: 13515 - protein, 218 aa, Artificial Sequence
  source: /note="Description of Artificial Sequence: Synthetic polypeptide"
  source: /note="VL46_N33T lambda"
DIVMTQSPLSLPVTLGEPASISCRSSQSIVHSTGNTYLEWYLQKPGQSPQLLIYTVSNRFSGVPDRFSGSGSGTDFTLKISRVEAEDLGVYYCFQGSHLPLTFGGGTKVEIKGQPKAAPSVTLFPPSSEELQANKATLVCLISDFYPGAVTVAWKADSSPVKAGVETTTPSKQSNNKYAASSYLSLTPEQWKSHRSYSCQVTHEGSTVEKTVAPTECS

SEQ ID NO: 13516 - protein, 219 aa, Artificial Sequence
  source: /note="Description of Artificial Sequence: Synthetic polypeptide"
  source: /note="VL46_S28N kappa"
DIVMTQSPLSLPVTLGEPASISCRSSQNIVHSNGNTYLEWYLQKPGQSPQLLIYTVSNRFSGVPDRFSGSGSGTDFTLKISRVEAEDLGVYYCFQGSHLPLTFGGGTKVEIKRTVAAPSVFIFPPSDEQLKSGTASVVCLLNNFYPREAKVQWKVDNALQSGNSQESVTEQDSKDSTYSLSSTLTLSKADYEKHKVYACEVTHQGLSSPVTKSFNRGEC

SEQ ID NO: 13517 - protein, 218 aa, Artificial Sequence
  source: /note="Description of Artificial Sequence: Synthetic polypeptide"
  source: /note="VL46_S28N lambda"
DIVMTQSPLSLPVTLGEPASISCRSSQNIVHSNGNTYLEWYLQKPGQSPQLLIYTVSNRFSGVPDRFSGSGSGTDFTLKISRVEAEDLGVYYCFQGSHLPLTFGGGTKVEIKGQPKAAPSVTLFPPSSEELQANKATLVCLISDFYPGAVTVAWKADSSPVKAGVETTTPSKQSNNKYAASSYLSLTPEQWKSHRSYSCQVTHEGSTVEKTVAPTECS

SEQ ID NO: 13518 - protein, 218 aa, Artificial Sequence
  source: /note="Description of Artificial Sequence: Synthetic polypeptide"
  source: /note="VL46_G34A_S28N lambda"
DIVMTQSPLSLPVTLGEPASISCRSSQNIVHSNANTYLEWYLQKPGQSPQLLIYTVSNRFSGVPDRFSGSGSGTDFTLKISRVEAEDLGVYYCFQGSHLPLTFGGGTKVEIKGQPKAAPSVTLFPPSSEELQANKATLVCLISDFYPGAVTVAWKADSSPVKAGVETTTPSKQSNNKYAASSYLSLTPEQWKSHRSYSCQVTHEGSTVEKTVAPTECS

SEQ ID NO: 13519 - DNA, 130 bp, Artificial Sequence
  source: /note="Description of Artificial Sequence: Synthetic polynucleotide"
ctgcgcgctcgctcgctcactgaggccgcccgggcaaagcccgggcgtcgggcgacctttggtcgcccggcctcagtgagcgagcgagcgcgcagagagggagtggccaactccatcactaggggttcct

SEQ ID NO: 13520 - DNA, 141 bp, Artificial Sequence
  source: /note="Description of Artificial Sequence: Synthetic polynucleotide"
cctgcaggcagctgcgcgctcgctcgctcactgaggccgcccgggcaaagcccgggcgtcgggcgacctttggtcgcccggcctcagtgagcgagcgagcgcgcagagagggagtggccaactccatcactaggggttcct

SEQ ID NO: 13521 - DNA, 130 bp, Artificial Sequence
  source: /note="Description of Artificial Sequence: Synthetic polynucleotide"
aggaacccctagtgatggagttggccactccctctctgcgcgctcgctcgctcactgaggccgggcgaccaaaggtcgcccgacgcccgggctttgcccgggcggcctcagtgagcgagcgagcgcgcag

SEQ ID NO: 13522 - DNA, 141 bp, Artificial Sequence
  source: /note="Description of Artificial Sequence: Synthetic polynucleotide"
aggaacccctagtgatggagttggccactccctctctgcgcgctcgctcgctcactgaggccgggcgaccaaaggtcgcccgacgcccgggctttgcccgggcggcctcagtgagcgagcgagcgcgcagctgcctgcagg

SEQ ID NO: 13523 - DNA, 1715 bp, Artificial Sequence
  source: /note="Description of Artificial Sequence: Synthetic polynucleotide"
ctagttattaatagtaatcaattacggggtcattagttcatagcccatatatggagttccgcgttacataacttacggtaaatggcccgcctggctgaccgcccaacgacccccgcccattgacgtcaataatgacgtatgttcccatagtaacgccaatagggactttccattgacgtcaatgggtggagtatttacggtaaactgcccacttggcagtacatcaagtgtatcatatgccaagtacgccccctattgacgtcaatgacggtaaatggcccgcctggcattatgcccagtacatgaccttatgggactttcctacttggcagtacatctacgtattagtcatcgctattaccatggtcgaggtgagccccacgttctgcttcactctccccatctcccccccctccccacccccaattttgtatttatttattttttaattattttgtgcagcgatgggggcggggggggggggggggcgcgcgccaggcggggcggggcggggcgaggggcggggcggggcgaggcggagaggtgcggcggcagccaatcagagcggcgcgctccgaaagtttccttttatggcgaggcggcggcggcggcggccctataaaaagcgaagcgcgcggcgggcgggagtcgctgcgcgctgccttcgccccgtgccccgctccgccgccgcctcgcgccgcccgccccggctctgactgaccgcgttactcccacaggtgagcgggcgggacggcccttctcctccgggctgtaattagcgcttggtttaatgacggcttgtttcttttctgtggctgcgtgaaagccttgaggggctccgggagggccctttgtgcggggggagcggctcggggggtgcgtgcgtgtgtgtgtgcgtggggagcgccgcgtgcggctccgcgctgcccggcggctgtgagcgctgcgggcgcggcgcggggctttgtgcgctccgcagtgtgcgcgaggggagcgcggccgggggcggtgccccgcggtgcggggggggctgcgaggggaacaaaggctgcgtgcggggtgtgtgcgtgggggggtgagcagggggtgtgggcgcgtcggtcgggctgcaaccccccctgcacccccctccccgagttgctgagcacggcccggcttcgggtgcggggctccgtacggggcgtggcgcggggctcgccgtgccgggcggggggtggcggcaggtgggggtgccgggcggggcggggccgcctcgggccggggagggctcgggggaggggcgcggcggcccccggagcgccggcggctgtcgaggcgcggcgagccgcagccattgccttttatggtaatcgtgcgagagggcgcagggacttcctttgtcccaaatctgtgcggagccgaaatctgggaggcgccgccgcaccccctctagcgggcgcggggcgaagcggtgcggcgccggcaggaaggaaatgggcggggagggccttcgtgcgtcgccgcgccgccgtccccttctccctctccagcctcggggctgtccgcggggggacggctgccttcgggggggacggggcagggcggggttcggcttctggcgtgtgaccggcggctctagagcctctgctaaccatgttcatgccttcttctttttcctacagctcctgggcaacgtgctggttattgtgctgtctcatcattttggcaaagaattc

SEQ ID NO: 13524 - DNA, 299 bp, Artificial Sequence
  source: /note="Description of Artificial Sequence: Synthetic polynucleotide"
tagcccatatatggagttccgcgttacataacttacggtaaatggcccgcctggctgaccgcccaacgacccccgcccattgacgtcaataatgacgtatgttcccatagtaacgccaatagggactttccattgacgtcaatgggtggagtatttacggtaaactgcccacttggcagtacatcaagtgtatcatatgccaagtacgccccctattgacgtcaatgacggtaaatggcccgcctggcattatgcccagtacatgaccttatgggactttcctacttggcagtacatct

SEQ ID NO: 13525 - DNA, 283 bp, Artificial Sequence
  source: /note="Description of Artificial Sequence: Synthetic polynucleotide"
catggtcgaggtgagccccacgttctgcttcactctccccatctcccccccctccccacccccaattttgtatttatttattttttaattattttgtgcagcgatgggggcggggggggggggggggcgcgcgccaggcggggcggggcggggcgaggggcggggcggggcgaggcggagaggtgcggcggcagccaatcagagcggcgcgctccgaaagtttccttttatggcgaggcggcggcggcggcggccctataaaaagcgaagcgcgcggcgggcg

SEQ ID NO: 13526 - DNA, 260 bp, Artificial Sequence
  source: /note="Description of Artificial Sequence: Synthetic polynucleotide"
ccacgttctgcttcactctccccatctcccccccctccccacccccaattttgtatttatttattttttaattattttgtgcagcgatgggggcggggggggggggcgcgcgccaggcggggcggggcggggcgaggggcggggcggggcgaggcggagaggtgcggcggcagccaatcagagcggcgcgctccgaaagtttccttttatggcgaggcggcggcggcggcggccctataaaaagcgaagcgcgcggcggg

SEQ ID NO: 13527 - DNA, 654 bp, Artificial Sequence
  source: /note="Description of Artificial Sequence: Synthetic polynucleotide"
cgacattgattattgactagttattaatagtaatcaattacggggtcattagttcatagcccatatatggagttccgcgttacataacttacggtaaatggcccgcctggctgaccgcccaacgacccccgcccattgacgtcaataatgacgtatgttcccatagtaacgccaatagggactttccattgacgtcaatgggtggagtatttacggtaaactgcccacttggcagtacatcaagtgtatcatatgccaagtacgccccctattgacgtcaatgacggtaaatggcccgcctggcattatgcccagtacatgaccttatgggactttcctacttggcagtacatctacgtattagtcatcgctattaccatgtcgaggccacgttctgcttcactctccccatctcccccccctccccacccccaattttgtatttatttattttttaattattttgtgcagcgatgggggcggggggggggggcgcgcgccaggcggggcggggcggggcgaggggcggggcggggcgaggcggagaggtgcggcggcagccaatcagagcggcgcgctccgaaagtttccttttatggcgaggcggcggcggcggcggccctataaaaagcgaagcgcgcggcgggcgggagc

SEQ ID NO: 13528 - DNA, 699 bp, Artificial Sequence
  source: /note="Description of Artificial Sequence: Synthetic polynucleotide"
gatctaacatatcctggtgtggagtagcggacgctgctatgacagaggctcgggggcctgagctggctctgtgagctggggaggaggcagacagccaggccttgtctgcaagcagacctggcagcattgggctggccgccccccagggcctcctcttcatgcccagtgaatgactcaccttggcacagacacaatgttcggggtgggcacagtgcctgcttcccgccgcaccccagcccccctcaaatgccttccgagaagcccattgagcagggggcttgcattgcaccccagcctgacagcctggcatcttgggataaaagcagcacagccccctaggggctgcccttgctgtgtggcgccaccggcggtggagaacaaggctctattcagcctgtgcccaggaaaggggatcaggggatgcccaggcatggacagtgggtggcagggggggagaggagggctgtctgcttcccagaagtccaaggacacaaatgggtgaggggagagctctccccatagctgggctgcggcccaaccccaccccctcaggctatgccagggggtgttgccaggggcacccgggcatcgccagtctagcccactccttcataaagccctcgcatcccaggagcgagcagagccagagcaggttggagaggagacgcatcacctccgctgctcgcggggatcctctag

SEQ ID NO: 13529 - DNA, 557 bp, Artificial Sequence
  source: /note="Description of Artificial Sequence: Synthetic polynucleotide"
tagtatctgcagagggccctgcgtatgagtgcaagtgggttttaggaccaggatgaggcggggtgggggtgcctacctgacgaccgaccccgacccactggacaagcacccaacccccattccccaaattgcgcatcccctatcagagagggggaggggaaacaggatgcggcgaggcgcgtgcgcactgccagcttcagcaccgcggacagtgccttcgcccccgcctggcggcgcgcgccaccgccgcctcagcactgaaggcgcgctgacgtcactcgccggtcccccgcaaactccccttcccggccaccttggtcgcgtccgcgccgccgccggcccagccggaccgcaccacgcgaggcgcgagataggggggcacgggcgcgaccatctgcgctgcggcgccggcgactcagcgctgcctcagtctgcggtgggcagcggaggagtcgtgtcgtgcctgagagcgcagctgtgctcctgggcaccgcgcagtccgcccccgcggctcctggccagaccacccctaggaccccctgccccaagtcgcagcc

SEQ ID NO: 13530 - DNA, 382 bp, Artificial Sequence
  source: /note="Description of Artificial Sequence: Synthetic polynucleotide"
ctagtcgacattgattattgactagttattaatagtaatcaattacggggtcattagttcatagcccatatatggagttccgcgttacataacttacggtaaatggcccgcctggctgaccgcccaacgacccccgcccattgacgtcaataatgacgtatgttcccatagtaacgccaatagggactttccattgacgtcaatgggtggagtatttacggtaaactgcccacttggcagtacatcaagtgtatcatatgccaagtacgccccctattgacgtcaatgacggtaaatggcccgcctggcattatgcccagtacatgaccttatgggactttcctacttggcagtacatctacgtattagtcatcgctattac

SEQ ID NO: 13531 - DNA, 1736 bp, Artificial Sequence
  source: /note="Description of Artificial Sequence: Synthetic polynucleotide"
ctagtcgacattgattattgactagttattaatagtaatcaattacggggtcattagttcatagcccatatatggagttccgcgttacataacttacggtaaatggcccgcctggctgaccgcccaacgacccccgcccattgacgtcaataatgacgtatgttcccatagtaacgccaatagggactttccattgacgtcaatgggtggagtatttacggtaaactgcccacttggcagtacatcaagtgtatcatatgccaagtacgccccctattgacgtcaatgacggtaaatggcccgcctggcattatgcccagtacatgaccttatgggactttcctacttggcagtacatctacgtattagtcatcgctattaccatggtcgaggtgagccccacgttctgcttcactctccccatctcccccccctccccacccccaattttgtatttatttattttttaattattttgtgcagcgatgggggcggggggggggggggggcgcgcgccaggcggggcggggcggggcgaggggcggggcggggcgaggcggagaggtgcggcggcagccaatcagagcggcgcgctccgaaagtttccttttatggcgaggcggcggcggcggcggccctataaaaagcgaagcgcgcggcgggcgggagtcgctgcgcgctgccttcgccccgtgccccgctccgccgccgcctcgcgccgcccgccccggctctgactgaccgcgttactcccacaggtgagcgggcgggacggcccttctcctccgggctgtaattagcgcttggtttaatgacggcttgtttcttttctgtggctgcgtgaaagccttgaggggctccgggagggccctttgtgcggggggagcggctcggggggtgcgtgcgtgtgtgtgtgcgtggggagcgccgcgtgcggctccgcgctgcccggcggctgtgagcgctgcgggcgcggcgcggggctttgtgcgctccgcagtgtgcgcgaggggagcgcggccgggggcggtgccccgcggtgcggggggggctgcgaggggaacaaaggctgcgtgcggggtgtgtgcgtgggggggtgagcagggggtgtgggcgcgtcggtcgggctgcaaccccccctgcacccccctccccgagttgctgagcacggcccggcttcgggtgcggggctccgtacggggcgtggcgcggggctcgccgtgccgggcggggggtggcggcaggtgggggtgccgggcggggcggggccgcctcgggccggggagggctcgggggaggggcgcggcggcccccggagcgccggcggctgtcgaggcgcggcgagccgcagccattgccttttatggtaatcgtgcgagagggcgcagggacttcctttgtcccaaatctgtgcggagccgaaatctgggaggcgccgccgcaccccctctagcgggcgcggggcgaagcggtgcggcgccggcaggaaggaaatgggcggggagggccttcgtgcgtcgccgcgccgccgtccccttctccctctccagcctcggggctgtccgcggggggacggctgccttcgggggggacggggcagggcggggttcggcttctggcgtgtgaccggcggctctagagcctctgctaaccatgttcatgccttcttctttttcctacagctcctgggcaacgtgctggttattgtgctgtctcatcattttggcaaagaattc

SEQ ID NO: 13532 - DNA, 365 bp, Artificial Sequence
  source: /note="Description of Artificial Sequence: Synthetic polynucleotide"
ctagtcgacattgattattgactagttattaatagtaatcaattacggggtcattagttcatagcccatatatggagttccgcgttacataacttacggtaaatggcccgcctggctgaccgcccaacgacccccgcccattgacgtcaataatgacgtatgttcccatagtaacgccaatagggactttccattgacgtcaatgggtggagtatttacggtaaactgcccacttggcagtacatcaagtgtatcatatgccaagtacgccccctattgacgtcaatgacggtaaatggcccgcctggcattatgcccagtacatgaccttatgggactttcctacttggcagtacatctacgta

SEQ ID NO: 13533 - DNA, 1714 bp, Artificial Sequence
  source: /note="Description of Artificial Sequence: Synthetic polynucleotide"
ctagttattaatagtaatcaattacggggtcattagttcatagcccatatatggagttccgcgttacataacttacggtaaatggcccgcctggctgaccgcccaacgacccccgcccattgacgtcaataatgacgtatgttcccatagtaacgccaatagggactttccattgacgtcaatgggtggagtatttacggtaaactgcccacttggcagtacatcaagtgtatcatatgccaagtacgccccctattgacgtcaatgacggtaaatggcccgcctggcattatgcccagtacatgaccttatgggactttcctacttggcagtacatctacgtattagtcatcgctattaccatggtcgaggtgagccccacgttctgcttcactctccccatctcccccccctccccacccccaattttgtatttatttattttttaattattttgtgcagcgatgggggcggggggggggggggggcgcgcgccaggcggggcggggcggggcgaggggcggggcggggcgaggcggagaggtgcggcggcagccaatcagagcggcgcgctccgaaagtttccttttatggcgaggcggcggcggcggcggccctataaaaagcgaagcgcgcggcgggcgggagtcgctgcgcgctgccttcgccccgtgccccgctccgccgccgcctcgcgccgcccgccccggctctgactgaccgcgttactcccacaggtgagcgggcgggacggcccttctcctccgggctgtaattagcgcttggtttaatgacggcttgtttcttttctgtggctgcgtgaaagccttgaggggctccgggagggccctttgtgcggggggagcggctcggggggtgcgtgcgtgtgtgtgtgcgtggggagcgccgcgtgcggctccgcgctgcccggcggctgtgagcgctgcgggcgcggcgcggggctttgtgcgctccgcagtgtgcgcgaggggagcgcggccgggggcggtgccccgcggtgcggggggggctgcgaggggaacaaaggctgcgtgcggggtgtgtgcgtgggggggtgagcagggggtgtgggcgcgtcggtcgggctgcaaccccccctgcacccccctccccgagttgctgagcacggcccggcttcgggtgcggggctccgtacggggcgtggcgcggggctcgccgtgccgggcggggggtggcggcaggtgggggtgccgggcggggcggggccgcctcgggccggggagggctcgggggaggggcgcggcggcccccggagcgccggcggctgtcgaggcgcggcgagccgcagccattgccttttatggtaatcgtgcgagagggcgcagggacttcctttgtcccaaatctgtgcggagccgaaatctgggaggcgccgccgcaccccctctagcgggcgcggggcgaagcggtgcggcgccggcaggaaggaaatgggcggggagggccttcgtgcgtcgccgcgccgccgtccccttctccctctccagcctcggggctgtccgcggggggacggctgccttcgggggggacggggcagggcggggttcggcttctggcgtgtgaccggcggctctagagcctctgctaaccatgttcatgccttcttctttttcctacagctcctgggcaacgtgctggttattgtgctgtctcatcattttggcaaagaatt

SEQ ID NO: 13534 - DNA, 380 bp, Artificial Sequence
  source: /note="Description of Artificial Sequence: Synthetic polynucleotide"
gacattgattattgactagttattaatagtaatcaattacggggtcattagttcatagcccatatatggagttccgcgttacataacttacggtaaatggcccgcctggctgaccgcccaacgacccccgcccattgacgtcaataatgacgtatgttcccatagtaacgccaatagggactttccattgacgtcaatgggtggagtatttacggtaaactgcccacttggcagtacatcaagtgtatcatatgccaagtacgccccctattgacgtcaatgacggtaaatggcccgcctggcattatgcccagtacatgaccttatgggactttcctacttggcagtacatctacgtattagtcatcgctattaccatg

SEQ ID NO: 13535 - DNA, 134 bp, Artificial Sequence
  source: /note="Description of Artificial Sequence: Synthetic polynucleotide"
tcagatcgcctggagacgccatccacgctgttttgacctccatagaagacaccgggaccgatccagcctccgcggattcgaatcccggccgggaacggtgcattggaacgcggattccccgtgccaagagtgac

SEQ ID NO: 13536 - DNA, 102 bp, Artificial Sequence
  source: /note="Description of Artificial Sequence: Synthetic polynucleotide"
ttgacctccatagaagacaccgggaccgatccagcctccgcggattcgaatcccggccgggaacggtgcattggaacgcggattccccgtgccaagagtgac

SEQ ID NO: 13537 - DNA, 59 bp, Artificial Sequence
  source: /note="Description of Artificial Sequence: Synthetic polynucleotide"
attcgaatcccggccgggaacggtgcattggaacgcggattccccgtgccaagagtgac

SEQ ID NO: 13538 - DNA, 53 bp, Artificial Sequence
  source: /note="Description of Artificial Sequence: Synthetic polynucleotide"
ctcctgggcaacgtgctggtctgtgtgctggcccatcactttggcaaagaatt

SEQ ID NO: 13539 - DNA, 54 bp, Artificial Sequence
  source: /note="Description of Artificial Sequence: Synthetic polynucleotide"
ctcctgggcaacgtgctggttattgtgctgtctcatcattttggcaaagaattc

SEQ ID NO: 13540 - DNA, 32 bp, Artificial Sequence
  source: /note="Description of Artificial Sequence: Synthetic polynucleotide"
gtaagtaccgcctatagagtctataggcccac

SEQ ID NO: 13541 - DNA, 15 bp, Artificial Sequence
  source: /note="Description of Artificial Sequence: Synthetic polynucleotide"
gtaagtaccgcctat

SEQ ID NO: 13542 - DNA, 347 bp, Artificial Sequence
  source: /note="Description of Artificial Sequence: Synthetic polynucleotide"
aaaaaatgctttcttcttttaatatacttttttgtttatcttatttctaatactttccctaatctctttctttcagggcaataatgatacaatgtatcatgcctctttgcaccattctaaagaataacagtgataatttctgggttaaggcaatagcaatatttctgcatataaatatttctgcatataaattgtaactgatgtaagaggtttcatattgctaatagcagctacaatccagctaccattctgcttttattttatggttgggataaggctggattattctgagtccaagctaggcccttttgctaatcatgttcatacctcttatcttcctcccacag

SEQ ID NO: 13543 - DNA, 168 bp, Artificial Sequence
  source: /note="Description of Artificial Sequence: Synthetic polynucleotide"
tctgcatataaattgtaactgatgtaagaggtttcatattgctaatagcagctacaatccagctaccattctgcttttattttatggttgggataaggctggattattctgagtccaagctaggcccttttgctaatcatgttcatacctcttatcttcctcccacag

SEQ ID NO: 13544 - DNA, 73 bp, Artificial Sequence
  source: /note="Description of Artificial Sequence: Synthetic polynucleotide"
aaaaaatgctttcttcttttaatatacttttcttttgctaatcatgttcatacctcttatcttcctcccacag

SEQ ID NO: 13545 - DNA, 73 bp, Artificial Sequence
  source: /note="Description of Artificial Sequence: Synthetic polynucleotide"
aggctggattattctgagtccaagctaggcccttttgctaatcatgttcatacctcttatcttcctcccacag

SEQ ID NO: 13546 - DNA, 73 bp, Artificial Sequence
  source: /note="Description of Artificial Sequence: Synthetic polynucleotide"
aaaaaatgctttcttcttttcaagctaggcccttttgctaatcatgttcatacctcttatcttcctcccacag

SEQ ID NO: 13547 - DNA, 53 bp, Artificial Sequence
  source: /note="Description of Artificial Sequence: Synthetic polynucleotide"
caagctaggcccttttgctaatcatgttcatacctcttatcttcctcccacag

SEQ ID NO: 13548 - DNA, 172 bp, Artificial Sequence
  source: /note="Description of Artificial Sequence: Synthetic polynucleotide"
gaactgaaaaaccagaaagttaactggtaagtttagtctttttgtcttttatttcaggtcccggatccggtggtggtgcaaatcaaagaactgctcctcagtggatgttgcctttacttctaggcctgtacggaagtgttacttctgctctaaaagctgcggaattgtaccc

SEQ ID NO: 13549 - DNA, 1074 bp, Artificial Sequence
  source: /note="Description of Artificial Sequence: Synthetic polynucleotide"
ggagtcgctgcgcgctgccttcgccccgtgccccgctccgccgccgcctcgcgccgcccgccccggctctgactgaccgcgttactcccacaggtgagcgggcgggacggcccttctcctccgggctgtaattagcgcttggtttaatgacggcttgtttcttttctgtggctgcgtgaaagccttgaggggctccgggagggccctttgtgcggggggagcggctcggggggtgcgtgcgtgtgtgtgtgcgtggggagcgccgcgtgcggctccgcgctgcccggcggctgtgagcgctgcgggcgcggcgcggggctttgtgcgctccgcagtgtgcgcgaggggagcgcggccgggggcggtgccccgcggtgcggggggggctgcgaggggaacaaaggctgcgtgcggggtgtgtgcgtgggggggtgagcagggggtgtgggcgcgtcggtcgggctgcaaccccccctgcacccccctccccgagttgctgagcacggcccggcttcgggtgcggggctccgtacggggcgtggcgcggggctcgccgtgccgggcggggggtggcggcaggtgggggtgccgggcggggcggggccgcctcgggccggggagggctcgggggaggggcgcggcggcccccggagcgccggcggctgtcgaggcgcggcgagccgcagccattgccttttatggtaatcgtgcgagagggcgcagggacttcctttgtcccaaatctgtgcggagccgaaatctgggaggcgccgccgcaccccctctagcgggcgcggggcgaagcggtgcggcgccggcaggaaggaaatgggcggggagggccttcgtgcgtcgccgcgccgccgtccccttctccctctccagcctcggggctgtccgcggggggacggctgccttcgggggggacggggcagggcggggttcggcttctggcgtgtgaccggcggctctagagcctctgctaaccatgttcatgccttcttctttttcctacagctcctgggcaacgtgctggttattgtgctgtctcatcattttggcaaagaattcgag

SEQ ID NO: 13550 - DNA, 41 bp, Artificial Sequence
  source: /note="Description of Artificial Sequence: Synthetic polynucleotide"
cctctgctaaccatgttcatgccttcttctttttcctacag

SEQ ID NO: 13551 - DNA, 566 bp, Artificial Sequence
  source: /note="Description of Artificial Sequence: Synthetic polynucleotide"
tcagatcgcctggagacgccatccacgctgttttgacctccatagaagacaccgggaccgatccagcctccgcggattcgaatcccggccgggaacggtgcattggaacgcggattccccgtgccaagagtgacgtaagtaccgcctatagagtctataggcccacaaaaaatgctttcttcttttaatatacttttttgtttatcttatttctaatactttccctaatctctttctttcagggcaataatgatacaatgtatcatgcctctttgcaccattctaaagaataacagtgataatttctgggttaaggcaatagcaatatttctgcatataaatatttctgcatataaattgtaactgatgtaagaggtttcatattgctaatagcagctacaatccagctaccattctgcttttattttatggttgggataaggctggattattctgagtccaagctaggcccttttgctaatcatgttcatacctcttatcttcctcccacagctcctgggcaacgtgctggtctgtgtgctggcccatcactttggcaaagaatt

SEQ ID NO: 13552 - DNA, 491 bp, Artificial Sequence
  source: /note="Description of Artificial Sequence: Synthetic polynucleotide"
attcgaatcccggccgggaacggtgcattggaacgcggattccccgtgccaagagtgacgtaagtaccgcctatagagtctataggcccacaaaaaatgctttcttcttttaatatacttttttgtttatcttatttctaatactttccctaatctctttctttcagggcaataatgatacaatgtatcatgcctctttgcaccattctaaagaataacagtgataatttctgggttaaggcaatagcaatatttctgcatataaatatttctgcatataaattgtaactgatgtaagaggtttcatattgctaatagcagctacaatccagctaccattctgcttttattttatggttgggataaggctggattattctgagtccaagctaggcccttttgctaatcatgttcatacctcttatcttcctcccacagctcctgggcaacgtgctggtctgtgtgctggcccatcactttggcaaagaatt

SEQ ID NO: 13553 - DNA, 387 bp, Artificial Sequence
  source: /note="Description of Artificial Sequence: Synthetic polynucleotide"
tcagatcgcctggagacgccatccacgctgttttgacctccatagaagacaccgggaccgatccagcctccgcggattcgaatcccggccgggaacggtgcattggaacgcggattccccgtgccaagagtgacgtaagtaccgcctatagagtctataggcccactctgcatataaattgtaactgatgtaagaggtttcatattgctaatagcagctacaatccagctaccattctgcttttattttatggttgggataaggctggattattctgagtccaagctaggcccttttgctaatcatgttcatacctcttatcttcctcccacagctcctgggcaacgtgctggtctgtgtgctggcccatcactttggcaaagaatt

SEQ ID NO: 13554 - DNA, 292 bp, Artificial Sequence
  source: /note="Description of Artificial Sequence: Synthetic polynucleotide"
tcagatcgcctggagacgccatccacgctgttttgacctccatagaagacaccgggaccgatccaggtaagtaccgcctatagagtctataggcccacaaaaaatgctttcttcttttaatatacttttttgtttatcttatttctaatactttccctaatctctttcgctggattattctgagtccaagctaggcccttttgctaatcatgttcatacctcttatcttcctcccacagctcctgggcaacgtgctggtctgtgtgctggcccatcactttggcaaagaatt

SEQ ID NO: 13555 - DNA, 84 bp, Artificial Sequence
  source: /note="Description of Artificial Sequence: Synthetic polynucleotide"
atggcgacgggttcaagaacttccctacttcttgcatttggcctgctttgtttgccgtggttacaggagggctcggcagctgcc

SEQ ID NO: 13556 - DNA, 93 bp, Artificial Sequence
  source: /note="Description of Artificial Sequence: Synthetic polynucleotide"
gccgccaccatggcgacgggttcaagaacttccctacttcttgcatttggcctgctttgtttgccgtggttacaggagggctcggcagctgcc

SEQ ID NO: 13557 - DNA, 96 bp, Artificial Sequence
  source: /note="Description of Artificial Sequence: Synthetic polynucleotide"
gccgccaccatgggggtgcacgaatgtcctgcctggctgtggcttctcctgtccctgctgtcgctccctctgggcctcccagtcctgggcgctgcc

SEQ ID NO: 13558 - DNA, 66 bp, Artificial Sequence
  source: /note="Description of Artificial Sequence: Synthetic polynucleotide"
gccgccaccatgggagtcaaagttctgtttgccctgatctgcatcgctgtggccgaggccgctgcc

SEQ ID NO: 13559 - DNA, 72 bp, Artificial Sequence
  source: /note="Description of Artificial Sequence: Synthetic polynucleotide"
gccgccaccatgaaacacctgtggttcttcctcctgctggtggcagctcccagatgggtcctgtccgctgcc

SEQ ID NO: 13560 - DNA, 93 bp, Artificial Sequence
  source: /note="Description of Artificial Sequence: Synthetic polynucleotide"
gccgccaccatggacctcctgcacaagaacatgaaacacctgtggttcttcctcctcctggtggcagctcccagatgggtgctgtccgctgcc

SEQ ID NO: 13561 - DNA, 69 bp, Artificial Sequence
  source: /note="Description of Artificial Sequence: Synthetic polynucleotide"
gccgccaccatggctttcctctggctcctctcctgctgggccctcctgggtaccaccttcggcgctgcc

SEQ ID NO: 13562 - DNA, 81 bp, Artificial Sequence
  source: /note="Description of Artificial Sequence: Synthetic polynucleotide"
gccgccaccatgccccccaagaagtgcctgctgctgctgctgaccctgctgctgctgatctccaccaccttcggcgctgcc

SEQ ID NO: 13563 - DNA, 12 bp, Artificial Sequence
  source: /note="Description of Artificial Sequence: Synthetic polynucleotide"
gccgccaccatg

SEQ ID NO: 13564 - DNA, 81 bp, Artificial Sequence
  source: /note="Description of Artificial Sequence: Synthetic polynucleotide"
gccgccaccatggacatgagggtccctgctcagctcctggggctcctgctgctctggctctcaggtgccagatgtgctgcc

SEQ ID NO: 13565 - DNA, 66 bp, Artificial Sequence
  source: /note="Description of Artificial Sequence: Synthetic polynucleotide"
gccgccaccatggaaatcaaggtgctgtttgccctcatctgtattgctgttgctgaggcagctgcc

SEQ ID NO: 13566 - DNA, 78 bp, Artificial Sequence
  source: /note="Description of Artificial Sequence: Synthetic polynucleotide"
gccgccaccatggagacagacacactcctgctatgggtactgctgctctgggttccaggttccactggtgacgctgcc

SEQ ID NO: 13567 - DNA, 57 bp, Artificial Sequence
  source: /note="Description of Artificial Sequence: Synthetic polynucleotide"
atgaacttcgggctcagcttgattttccttgtccttgttttaaaaggtgtccagtgt

SEQ ID NO: 13568 - DNA, 57 bp, Artificial Sequence
  source: /note="Description of Artificial Sequence: Synthetic polynucleotide"
atgggatggagctggatctttctctttctcctgtcaggaactacaggtgtcctctct

SEQ ID NO: 13569 - DNA, 57 bp, Artificial Sequence
  source: /note="Description of Artificial Sequence: Synthetic polynucleotide"
atgaagttgcctgttaggctgttggtgctgatgttctggattcctgcttccagcagt

SEQ ID NO: 13570 - DNA, 348 bp, Artificial Sequence
  source: /note="Description of Artificial Sequence: Synthetic polynucleotide"
aagctggtggagagcggcggcgacctggtgaagcctggcggcagcctgaagctgagctgcgccgccagcggcttcaccttcagcagctacgccatgagctgggtgagacagaaccctgagaagagactggagtgggtggccagcatcagcaagggcggcaacacctactaccctaacagcgtgaagggcagattcaccatcagcagagacaacgccagaaacatcctgtacctgcagatgagcagcctgagaagcgaggacaccgccctgtactactgcgccagaggctggggcgactacggctggttcgcctactggggccaggtgaccctggtgaccgtgagcgcc

SEQ ID NO: 13571 - DNA, 27 bp, Artificial Sequence
  source: /note="Description of Artificial Sequence: Synthetic polynucleotide"
tacccatacgatgttccagattacgct

SEQ ID NO: 13572 - DNA, 21 bp, Artificial Sequence
  source: /note="Description of Artificial Sequence: Synthetic polynucleotide"
agcgagaaggacgagctgtag

SEQ ID NO: 13573 - DNA, 18 bp, Artificial Sequence
  source: /note="Description of Artificial Sequence: Synthetic polynucleotide"
agcgagaaggacgagctg

SEQ ID NO: 13574 - DNA, 18 bp, Artificial Sequence
  source: /note="Description of Artificial Sequence: Synthetic polynucleotide"
catcaccatcaccatcac

SEQ ID NO: 13575 - DNA, 18 bp, Artificial Sequence
  source: /note="Description of Artificial Sequence: Synthetic polynucleotide"
catcatcaccatcaccat

SEQ ID NO: 13576 - DNA, 127 bp, Artificial Sequence
  source: /note="Description of Artificial Sequence: Synthetic polynucleotide"
gatctttttccctctgccaaaaattatggggacatcatgaagccccttgagcatctgacttctggctaataaaggaaatttattttcattgcaatagtgtgttggaattttttgtgtctctcactcg

SEQ ID NO: 13577 - DNA, 477 bp, Artificial Sequence
  source: /note="Description of Artificial Sequence: Synthetic polynucleotide"
gggtggcatccctgtgacccctccccagtgcctctcctggccctggaagttgccactccagtgcccaccagccttgtcctaataaaattaagttgcatcattttgtctgactaggtgtccttctataatattatggggtggaggggggtggtatggagcaaggggcaagttgggaagacaacctgtagggcctgcggggtctattgggaaccaagctggagtgcagtggcacaatcttggctcactgcaatctccgcctcctgggttcaagcgattctcctgcctcagcctcccgagttgttgggattccaggcatgcatgaccaggctcagctaatttttgtttttttggtagagacggggtttcaccatattggccaggctggtctccaactcctaatctcaggtgatctacccaccttggcctcccaaattgctgggattacaggcgtgaaccactgctcccttccctgtcctt

SEQ ID NO: 13578 - DNA, 552 bp, Artificial Sequence
  source: /note="Description of Artificial Sequence: Synthetic polynucleotide"
gaattcactcctcaggtgcaggctgcctatcagaaggtggtggctggtgtggccaatgccctggctcacaaataccactgagatctttttccctctgccaaaaattatggggacatcatgaagccccttgagcatctgacttctggctaataaaggaaatttattttcattgcaatagtgtgttggaattttttgtgtctctcactcggaaggacatatgggagggcaaatcatttaaaacatcagaatgagtatttggtttagagtttggcaacatatgcccatatgctggctgccatgaacaaaggttggctataaagaggtcatcagtatatgaaacagccccctgctgtccattccttattccatagaaaagccttgacttgaggttagattttttttatattttgttttgtgttatttttttctttaacatccctaaaattttccttacatgttttactagccagatttttcctcctctcctgactactcccagtcatagctgtccctcttctcttatggagatccctcgacctgcagcccaagctt

SEQ ID NO: 13579 - DNA, 1153 bp, Artificial Sequence
  source: /note="Description of Artificial Sequence: Synthetic polynucleotide"
cctaggtttcttgagacctctacaagagttggagttgacacttggggtactttcttggtgtaacgaactaatagcctgaaaaaaagaagtcatgtgttttcagcaaggcaagaaactgtctaacatagtagataaaacagagaacacttggccggaatcaactaagatgttgctatgttccattcatcatattatctccatctgcagagtagtgggttagtggagggtagaaaacattctcctgaacaactagttaaacttggctttgagttccacctgtaccacttgcataatcttgggaaagtgagttgcctaattcagtgacattaataaatttattaatttcttctttcaataaaacctggagagagcttcatatgtatcagcatatgctaaacttgaaagatacaagtagaaaatggaaggaaatatatctgactcaatagggatagttcaagggttaaattaaaagtagtaaagtattataattaatctgacatggtacctaatatataataatcatgtattaagaatgccagtcaccattaaaagtcaatgtatgactttaatctactcgaggaaagaaactatgtcttgttcactgttattatctctaaaatccataatcagaagagcaccatgtgtatgagccacacaataaatatctactgtataatatgtctcttcttgtttttaaccttcatagataagactctattgaattgggacattagtccagcaagccattctgtctctgtctcttctatggagggaaaggtttaaccatcaaagactaggtgcatctcccaaacaacctgaatttaatattcaaatatgtatctaaattcatttgttacatttttgtgttcagcttacatattactttttgagcgacatctattcaaggcctactacttgctgctctacaaaatattgccatgctctatttgcccattaactatttcttaaccttcaagggacatgctcagttctgatataccaagatttggtatttaccctcccagcctacatacttccaatcttaagagaacaatttttagactacattcaaatatagacctctccaccccatcaactattttatctctcctctcctatctttcttgacaaagagtgattagaaatatgcaat

SEQ ID NO: 13580 - DNA, 1240 bp, Artificial Sequence
  source: /note="Description of Artificial Sequence: Synthetic polynucleotide"
attatatttttttaaagactcacatagtcttctgcacagggcattctttttgcttcaggatgtttacaacatttgctgcccacttttcctaggtttcttgagacctctacaagagttggagttgacacttggggtactttcttggtgtaacgaactaatagcctgaaaaaaagaagtcatgtgttttcagcaaggcaagaaactgtctaacatagtagataaaacagagaacacttggccggaatcaactaagatgttgctatgttccattcatcatattatctccatctgcagagtagtgggttagtggagggtagaaaacattctcctgaacaactagttaaacttggctttgagttccacctgtaccacttgcataatcttgggaaagtgagttgcctaattcagtgacattaataaatttattaatttcttctttcaataaaacctggagagagcttcatatgtatcagcatatgctaaacttgaaagatacaagtagaaaatggaaggaaatatatctgactcaatagggatagttcaagggttaaattaaaagtagtaaagtattataattaatctgacatggtacctaatatataataatcatgtattaagaatgccagtcaccattaaaagtcaatgtatgactttaatctactcgaggaaagaaactatgtcttgttcactgttattatctctaaaatccataatcagaagagcaccatgtgtatgagccacacaataaatatctactgtataatatgtctcttcttgtttttaaccttcatagataagactctattgaattgggacattagtccagcaagccattctgtctctgtctcttctatggagggaaaggtttaaccatcaaagactaggtgcatctcccaaacaacctgaatttaatattcaaatatgtatctaaattcatttgttacatttttgtgttcagcttacatattactttttgagcgacatctattcaaggcctactacttgctgctctacaaaatattgccatgctctatttgcccattaactatttcttaaccttcaagggacatgctcagttctgatataccaagatttggtatttaccctcccagcctacatacttccaatcttaagagaacaatttttagactacattcaaatatagacctctccaccccatcaactattttatctctcctctcctatctttcttgacaaagagtgattagaaatatgcaat
